(19) United States
(12) Patent Application Publication
(10) Pub. No.: US 2024/0376466 A1
(43) Pub. Date: Nov. 14, 2024

(54) GENOME EDITING COMPOSITIONS AND METHODS FOR TREATMENT OF FANCONI ANEMIA

(71) Applicant: Prime Medicine, Inc., Cambridge, MA (US)

(72) Inventors: Jennifer L. GORI, Jamaica Plain, MA (US); David WATERMAN, Framingham, MA (US); Dewi HARJANTO, Brookline, MA (US)

(21) Appl. No.: 18/653,321

(22) Filed: May 2, 2024

Related U.S. Application Data
(63) Continuation of application No. PCT/US2022/079257, filed on Nov. 3, 2022.
(60) Provisional application No. 63/275,702, filed on Nov. 4, 2021.

(51) Int. Cl. C12N 15/11; C12N 9/22

(52) U.S. Cl. CPC C12N 15/11; C12N 9/22; C12N 2310/20

(57) ABSTRACT

Provided herein are compositions and methods of using prime editing systems comprising prime editors and prime editing guide RNAs for treatment of genetic disorders.

### CROSS-REFERENCE

[0001] This application is a continuation of International Application No. PCT/US2022/079257, filed Nov. 3, 2022, which claims the benefit of U.S. Provisional Application No. 63/275,702, filed Nov. 4, 2021, each of which applications are incorporated herein by reference in their entirety.

### SEQUENCE LISTING

[0002] The instant application contains a Sequence Listing which has been submitted electronically in XML format and is hereby incorporated by reference in its entirety. Said XML copy, created on Dec. 19, 2022, is named 59761-746_601_SL.xml and is 3,575,873 bytes in size.

### BACKGROUND

[0003] Fanconi Anemia (FA) is an inherited autosomal recessive DNA repair disorder characterized by congenital abnormalities, cancer predisposition, and progressive bone marrow failure (BMF). Fanconi anemia occurs in about 1 in 160,000 live births worldwide. FA can be caused by mutations in one or more of 23 genes whose protein products are members of or associated with the Fanconi anemia DNA repair complex called FA core complex. The FA core complex responds to and repairs DNA breaks that occur naturally during cellular replication or in response to radiation or DNA crosslinking agents via activation of a FA/BRCA DNA repair pathway. The pathway can promote homologous recombination (HR) repair, regulate cytokinesis and pathway disruption can result in increased binucleate bone marrow cells and apoptosis.

[0004] Based on the mutation in one or more of the 23 genes, at least 19 genetic subtypes of FA have been distinguished: FA-A, -B, -C, -D1, -D2, -E, -F, -G, -I, -J, -L, -M, -N, -O, and -P, -Q, -R, -S, and -T. The majority of patients (˜85%) belong to the subtype FA-A (˜60%) that results from inherited pathogenic variants of FANCA gene, subtype FA-C(15%) that results from inherited pathogenic variants of FANCC gene, or subtype FA-G (A10%) that results from inherited pathogenic variants of FANG, while a minority (˜15%) is distributed over the remaining 16 subtypes, with relative prevalence between <1 and 5%. FA-C patients are likely to undergo BMF in the first decade of life and allogeneic hematopoietic stem cell transplantation (allo-HSCT) is currently the only curative option. However, the sensitivity of FA-C patient cells to DNA damage complicates allo-HSCT because of the reliance on alkylating agents and radiation for pre-transplant conditioning. In some cases, a first line therapy of androgen and growth factors are used but only 50% to 75% of patients respond to this treatment. FA-C patients demonstrate higher incidence and more rapid emergence of BMF compared to other groups at a median age of 2.7 years.

### SUMMARY

[0005] The present disclosure provides compositions and methods for correcting mutations associated with Fanconi anemia of complementation group C (FA-C), and compositions and methods for treatment of Fanconi anemia of complementation group C (FA-C).

[0006] Provided herein, in some embodiments, are methods and compositions for prime editing of alterations in a target sequence in a target gene, for example, an FANCC gene. The target FANCC gene can comprise double stranded DNA. As exemplified in FIG. 1, in an embodiment, the target gene is edited by prime editing.

[0007] Without wishing to be bound by any particular theory, the prime editing process can search specific targets and edit endogenous sequences in a target gene, e.g., the FANCC gene. As exemplified in FIG. 1, the spacer sequence of a PEgRNA recognizes and anneals with a search target sequence in a target strand of the target gene. A prime editing complex may generate a nick in the target gene on the edit strand which is the complementary strand of the target strand. The prime editing complex can then use a free 3′ end formed at the nick site of the edit strand to initiate DNA synthesis, where a primer binding site (PBS) of the PEgRNA complexes with the free 3′ end, and a single stranded DNA is synthesized using an editing template of the PEgRNA as a template. The editing template may comprise one or more nucleotide edits compared to the endogenous target FANCC gene sequence. Accordingly, the newly-synthesized single stranded DNA also comprises the nucleotide edit(s) encoded by the editing template. Through removal of an editing target sequence on the edit strand of the target gene and DNA repair, the intended nucleotide edit(s) included in the newly synthesized single stranded DNA are incorporated into the target FANCC gene.

[0008] In one aspect, provided herein is a prime editing guide RNA (PEgRNA) or a nucleic acid encoding the PEgRNA, wherein the PEgRNA comprises: a) a spacer that is complementary to a search target sequence on a first strand of a FANCC gene wherein the spacer comprises at its 3′ end SEQ ID NO: 136; b) a gRNA core capable of binding to a Cas9 protein; and c) an extension arm comprising: i) an editing template that comprises a region of complementarity to an editing target sequence on a second strand of the FANCC gene, and ii) a primer binding site (PBS) that comprises at its 5′ end a sequence that is a reverse complement of nucleotides 10-14 of SEQ ID NO: 136, wherein the first strand and second strand are complementary to each other, wherein the editing target sequence on the second strand comprises or is complementary to a portion of the FANCC gene comprising a c.67del mutation, and wherein the editing template encodes an insertion of a guanine nucleotide at a site corresponding to the c.67del mutation compared to the editing target sequence. In some embodiments, the spacer comprises at its 3′ end any one of SEQ ID NOs: 137-141. In some embodiments, the spacer comprises at its 3′ end SEQ ID NO: 139. In some embodiments, the editing template comprises SEQ ID NO: 157 at its 3′ end. In some embodiments, the editing template comprises at its 3′ end SEQ ID NO: 159, 160, 162, 163, 165, 166, 168-181, 183, 184, 186, 187, or 189-194. In some embodiments, the editing template comprises SEQ ID NO: 158 at its 3′ end and encodes an AGG-to-AAG PAM silencing edit. In some embodiments, the editing template comprises at its 3′ end SEQ ID NO: 161, 164, 167, 182, 185, or 188. In some embodiments, the editing template is 10 to 40 nucleotides in length. In some embodiments, the editing template is 10 to 32 nucleotides in length. In some embodiments, the editing template is 12 to 16 nucleotides in length. In some embodiments, the PBS comprises at its 5′ end a sequence corresponding to sequence number 142. In some embodiments, the PBS comprises any one of sequence numbers 142-146, or any one of SEQ ID NOs: 147-156. In some embodiments, the PBS is 8 to 14 nucleotides in length. In some embodiments, the PBS is 14 nucleotides in length. In some embodiments, the gRNA core comprises SEQ ID NO: 3666. In some embodiments, a PEgRNA sequence is selected from any one of SEQ ID NOs: 219-322 or 3592-3603. In some embodiments, the spacer, the gRNA core, the editing template, and the PBS form a contiguous sequence in a single molecule. In some embodiments, the PEgRNA comprises from 5′ to 3′, the spacer, the gRNA core, the editing template, and the PBS. In some embodiments, the PEgRNA further comprises 3′ mN*mN*mN*N and 5′mN*mN*mN* modifications, where m indicates that the nucleotide contains a 2′-O-Me modification and a * indicates the presence of a phosphorothioate bond. In some embodiments, the PEgRNA further comprises 3′ mT*mT*mT*T and 5′mN*mN*mN* modifications, where m indicates that the nucleotide contains a 2′-O-Me modification, a * indicates the presence of a phosphorothioate bond, and a T indicates the presence of an additional uridine nucleotide.

[0009] In one aspect, provided herein is a prime editing guide RNA (PEgRNA), or a nucleic acid encoding the PEgRNA, wherein the PEgRNA comprises: a) a spacer comprising at its 3′ end SEQ ID NO: 136; b) a gRNA core capable of binding to a Cas9 protein; and c) an extension arm comprising: i) an editing template comprising at its 3′ end SEQ ID NO: 157 or 158, and ii) a primer binding site (PBS) comprising at its 5′ end a sequence that is a reverse complement of nucleotides 10-14 of SEQ ID NO: 136. In some embodiments, the spacer comprises at its 3′ end any one of SEQ ID NOs: 137-141. In some embodiments, the spacer comprises at its 3′ end SEQ ID NO: 139. In some embodiments, the editing template comprises SEQ ID NO: 157 at its 3′ end. In some embodiments, the editing template comprises at its 3′ end SEQ ID NO: 159, 160, 162, 163, 165, 166, 168-181, 183, 184, 186, 187, or 189-194. In some embodiments, the editing template comprises SEQ ID NO: 158 at its 3′ end and encodes an AGG-to-AAG PAM silencing edit. In some embodiments, the editing template comprises at its 3′ end SEQ ID NO: 161, 164, 167, 182, 185, or 188. In some embodiments, the editing template is 10 to 40 nucleotides in length. In some embodiments, the editing template is 10 to 32 nucleotides in length. In some embodiments, the editing template is 12 to 16 nucleotides in length. In some embodiments, the PBS comprises at its 5′ end a sequence corresponding to sequence number 142. In some embodiments, the PBS comprises any one of sequence numbers 142-146, or any one of SEQ ID NOs: 147-156. In some embodiments, the PBS is 8 to 14 nucleotides in length. In some embodiments, the PBS is 14 nucleotides in length. In some embodiments, the gRNA core comprises SEQ ID NO: 3666. In some embodiments, a PEgRNA sequence is selected from any one of SEQ ID NOs: 219-322 or 3592-3603. In some embodiments, the spacer, the gRNA core, the editing template, and the PBS form a contiguous sequence in a single molecule. In some embodiments, the PEgRNA comprises from 5′ to 3′, the spacer, the gRNA core, the editing template, and the PBS. In some embodiments, the PEgRNA further comprises 3′ mN*mN*mN*N and 5′mN*mN*mN* modifications, where m indicates that the nucleotide contains a 2′-O-Me modification and a * indicates the presence of a phosphorothioate bond. In some embodiments, the PEgRNA further comprises 3′ mT*mT*mT*T and 5′mN*mN*mN* modifications, where m indicates that the nucleotide contains a 2′-O-Me modification, a * indicates the presence of a phosphorothioate bond, and a T indicates the presence of an additional uridine nucleotide.

[0010] In one aspect, provided herein is a prime editing system comprising: (a) the PEgRNA or the nucleic acid of any one of the aspects or embodiments herein, and (b) a ngRNA, or a nucleic acid encoding the ngRNA, wherein the ngRNA comprises: (i) a spacer comprising at its 3′ end a sequence corresponding to nucleotides 4-20 of any one of SEQ ID NOs: 4 or 195-218; and (ii) an ngRNA core capable of binding a Cas9 protein. In some embodiments, the spacer of the ngRNA comprises at its 3′ end any one of SEQ ID NOs: 4 or 195-218. In some embodiments, the ngRNA core comprises the same sequence as the gRNA core. In some embodiments, the ngRNA core comprises SEQ ID NO: 3666. In some embodiments, the ngRNA comprises any one of SEQ ID NOs: 323-343 or 3604-3610. In some embodiments, the PEgRNA and the ngRNA further comprise 3′ mN*mN*mN*N and 5′mN*mN*mN* modifications, where m indicates that the nucleotide contains a 2′-O-Me modification and a * indicates the presence of a phosphorothioate bond. In some embodiments, the PEgRNA and the ngRNA further comprise 3′ mT*mT*mT*T and 5′mN*mN*mN* modifications, where m indicates that the nucleotide contains a 2′-O-Me modification, a * indicates the presence of a phosphorothioate bond, and a T indicates the presence of an additional uridine nucleotide. In some embodiments, the prime editing system further comprises: (c) a prime editor comprising a Cas9 nickase comprising a nuclease inactivating mutation in a HNH domain, or a nucleic acid encoding the Cas9 nickase, and a reverse transcriptase, or a nucleic acid encoding the reverse transcriptase. In some embodiments, the prime editor is a fusion protein. In some embodiments, the prime editing system further comprises: (c) an N-terminal extein comprising an N-terminal fragment of a prime editor fusion protein and an N-intein or a nucleic acid encoding the N-terminal extein; and (d) a C-terminal extein comprising a C-terminal fragment of the prime editor fusion protein and a C-intein, or a nucleic acid encoding the C-terminal extein; wherein the N-intein and the C-intein of the N-terminal and C-terminal exteins are capable of self-excision to join the N-terminal fragment and the C-terminal fragment to form the prime editor fusion protein, and wherein the prime editor fusion protein comprises a Cas9 nickase comprising a nuclease inactivating mutation in a HNH domain and a reverse transcriptase. In some embodiments, the Cas9 nickase comprises an amino acid sequence comprising at least 80%, 85%, 90%, 95%, 96%, 97%, 98%, 99%, or 100% sequence identity to SEQ ID NO: 3695 or SEQ ID NO: 3696. In some embodiments, the reverse transcriptase comprises an amino acid sequence comprising at least 80%, 85%, 90%, 95%, 96%, 97%, 98%, 99%, or 100% sequence identity to SEQ ID NO: 3692. In some embodiments, the sequence identities are determined by Needleman-Wunsch alignment of two protein sequences with Gap Costs set to Existence: 11 Extension: 1 where percent identity is calculated by dividing the number of identities by the length of the alignment. In some embodiments, the nucleic acid encoding the Cas9 nickase, and/or the nucleic acid encoding the reverse transcriptase are mRNA.

[0011] In one aspect, provided herein is a prime editing guide RNA (PEgRNA) or a nucleic acid encoding the PEgRNA, wherein the PEgRNA comprises: a) a spacer that is complementary to a search target sequence on a first strand of a FANCC gene wherein the spacer comprises at its 3′ end SEQ ID NO: 915; b) a gRNA core capable of binding to a Cas9 protein; and c) an extension arm comprising: i) an editing template that comprises a region of complementarity to an editing target sequence on a second strand of the FANCC gene, and ii) a primer binding site (PBS) that comprises at its 5′ end a sequence that is a reverse complement of nucleotides 10-14 of SEQ ID NO: 915, wherein the first strand and second strand are complementary to each other, wherein the editing target sequence on the second strand comprises or is complementary to a portion of the FANCC gene comprising a c.67del mutation, and wherein the editing template encodes an insertion of a guanine nucleotide at a site corresponding to the c.67del mutation compared to the editing target sequence. In some embodiments, the spacer comprises at its 3′ end any one of SEQ ID NOs: 916, 917, 35, 918, or 919. In some embodiments, the spacer comprises at its 3′ end SEQ ID NO: 35. In some embodiments, the editing template comprises at its 3′ end any one of SEQ ID NOs: 936-964 or 384. In some embodiments, the editing template is 10 to 40 nucleotides in length. In some embodiments, the editing template is 11 to 20 nucleotides in length. In some embodiments, the PBS comprises at its 5′end a sequence corresponding to sequence number 920. In some embodiments, the PBS comprises a sequence corresponding to any one of sequence numbers 920-924 or any one of SEQ ID Nos: 925-934. In some embodiments, the PBS is 8 to 14 nucleotides in length. In some embodiments, the PBS is 8 to 12 nucleotides in length. In some embodiments, the gRNA core comprises SEQ ID NO: 3666. In some embodiments, a PEgRNA sequence comprises any one of SEQ ID NOs: 965-1024 or 3611-3630. In some embodiments, the spacer, the gRNA core, the editing template, and the PBS form a contiguous sequence in a single molecule. In some embodiments, the PEgRNA comprises from 5′ to 3′, the spacer, the gRNA core, the editing template, and the PBS. In some embodiments, the PEgRNA further comprises 3′ mN*mN*mN*N and 5′mN*mN*mN* modifications, where m indicates that the nucleotide contains a 2′-O-Me modification and a * indicates the presence of a phosphorothioate bond. In some embodiments, the PEgRNA further comprises 3′ mT*mT*mT*T and 5′mN*mN*mN* modifications, where m indicates that the nucleotide contains a 2′-O-Me modification, a * indicates the presence of a phosphorothioate bond, and a T indicates the presence of an additional uridine nucleotide.

[0012] In one aspect, provided herein is a prime editing guide RNA (PEgRNA), or a nucleic acid encoding the PEgRNA, wherein the PEgRNA comprises: a) a spacer comprising at its 3′ end SEQ ID NO: 915; b) a gRNA core capable of binding to a Cas9 protein; and c) an extension arm comprising: i) an editing template comprising at its 3′ end SEQ ID NO: 935, and ii) a primer binding site (PBS) comprising at its 5′ end a sequence that is a reverse complement of nucleotides 10-14 of SEQ ID NO: 915. In some embodiments, the spacer comprises at its 3′ end any one of SEQ ID NOs: 916, 917, 35, 918, or 919. In some embodiments, the spacer comprises at its 3′ end SEQ ID NO: 35. In some embodiments, the editing template comprises at its 3′ end any one of SEQ ID NOs: 936-964 or 384. In some embodiments, the editing template is 10 to 40 nucleotides in length. In some embodiments, the editing template is 11 to 20 nucleotides in length. In some embodiments, the PBS comprises at its 5′end a sequence corresponding to sequence number 920. In some embodiments, the PBS comprises a sequence corresponding to any one of sequence numbers 920-924 or any one of SEQ ID Nos: 925-934. In some embodiments, the PBS is 8 to 14 nucleotides in length. In some embodiments, the PBS is 8 to 12 nucleotides in length. In some embodiments, the gRNA core comprises SEQ ID NO: 3666. In some embodiments, a PEgRNA sequence comprises any one of SEQ ID NOs: 965-1024 or 3611-3630. In some embodiments, the spacer, the gRNA core, the editing template, and the PBS form a contiguous sequence in a single molecule. In some embodiments, the PEgRNA comprises from 5′ to 3′, the spacer, the gRNA core, the editing template, and the PBS. In some embodiments, the PEgRNA further comprises 3′ mN*mN*mN*N and 5′mN*mN*mN* modifications, where m indicates that the nucleotide contains a 2′-O-Me modification and a * indicates the presence of a phosphorothioate bond. In some embodiments, the PEgRNA further comprises 3′ mT*mT*mT*T and 5′mN*mN*mN* modifications, where m indicates that the nucleotide contains a 2′-O-Me modification, a * indicates the presence of a phosphorothioate bond, and a T indicates the presence of an additional uridine nucleotide.

[0013] In one aspect, provided herein is a prime editing system comprising: (a) the PEgRNA or the nucleic acid of any one of the aspects or embodiments herein, and (b) a ngRNA, or a nucleic acid encoding the ngRNA, wherein the ngRNA comprises: (i) a spacer comprising at its 3′ end a sequence corresponding to nucleotides 4-20 of any one of SEQ ID NOs: 4, 195-197, 199-206, 208-218, or 384; and (ii) an ngRNA core capable of binding a Cas9 protein. In some embodiments, the spacer of the ngRNA comprises at its 3′ end any one of SEQ ID NOs: 4, 195-197, 199-206, 208-218, or 384. In some embodiments, the ngRNA core comprises the same sequence as the gRNA core. In some embodiments, the ngRNA core comprises SEQ ID NO: 3666. In some embodiments, the ngRNA comprises any one of SEQ ID NOs: 323-343 or 3604-3610. In some embodiments, the PEgRNA and the ngRNA further comprise 3′ mN*mN*mN*N and 5′mN*mN*mN* modifications, where m indicates that the nucleotide contains a 2′-O-Me modification and a * indicates the presence of a phosphorothioate bond. In some embodiments, the PEgRNA and the ngRNA further comprise 3′ mT*mT*mT*T and 5′mN*mN*mN* modifications, where m indicates that the nucleotide contains a 2′-O-Me modification, a * indicates the presence of a phosphorothioate bond, and a T indicates the presence of an additional uridine nucleotide. In some embodiments, the prime editing system further comprises: (c) a prime editor comprising a Cas9 nickase comprising a nuclease inactivating mutation in a HNH domain, or a nucleic acid encoding the Cas9 nickase, and a reverse transcriptase, or a nucleic acid encoding the reverse transcriptase. In some embodiments, the prime editor is a fusion protein. In some embodiments, the prime editing system further comprises: (c) an N-terminal extein comprising an N-terminal fragment of a prime editor fusion protein and an N-intein or a nucleic acid encoding the N-terminal extein; and (d) a C-terminal extein comprising a C-terminal fragment of the prime editor fusion protein and a C-intein, or a nucleic acid encoding the C-terminal extein; wherein the N-intein and the C-intein of the N-terminal and C-terminal exteins are capable of self-excision to join the N-terminal fragment and the C-terminal fragment to form the prime editor fusion protein, and wherein the prime editor fusion protein comprises a Cas9 nickase comprising a nuclease inactivating mutation in a HNH domain and a reverse transcriptase. In some embodiments, the Cas9 nickase comprises an amino acid sequence comprising at least 80%, 85%, 90%, 95%, 96%, 97%, 98%, 99%, or 100% sequence identity to SEQ ID NO: 3695 or SEQ ID NO: 3696. In some embodiments, the reverse transcriptase comprises an amino acid sequence comprising at least 80%, 85%, 90%, 95%, 96%, 97%, 98%, 99%, or 100% sequence identity to SEQ ID NO: 3692. In some embodiments, the sequence identities are determined by Needleman-Wunsch alignment of two protein sequences with Gap Costs set to Existence: 11 Extension: 1 where percent identity is calculated by dividing the number of identities by the length of the alignment. In some embodiments, the nucleic acid encoding the Cas9 nickase, and/or the nucleic acid encoding the reverse transcriptase are mRNA.

[0014] In one aspect, provided herein is a prime editing guide RNA (PEgRNA) or a nucleic acid encoding the PEgRNA, wherein the PEgRNA comprises: a) a spacer that is complementary to a search target sequence on a first strand of a FANCC gene wherein the spacer comprises at its 3′ end SEQ ID NO: 3086; b) a gRNA core capable of binding to a Cas9 protein; and c) an extension arm comprising: i) an editing template that comprises a region of complementarity to an editing target sequence on a second strand of the FANCC gene, and ii) a primer binding site (PBS) that comprises at its 5′ end a sequence that is a reverse complement of nucleotides 10-14 of SEQ ID NO: 3086, wherein the first strand and second strand are complementary to each other, wherein the editing target sequence on the second strand comprises or is complementary to a portion of the FANCC gene comprising a c.456+4A->T substitution, and wherein the editing template encodes a T to A nucleotide substitution at a site corresponding to the c.456+4A->T substitution compared to the editing target sequence. In some embodiments, the spacer comprises at its 3′ end any one of SEQ ID NOs: 3087, 3088, 2619, 3089, or 3090. In some embodiments, the spacer comprises at its 3′ end SEQ ID NO: 2619. In some embodiments, the editing template comprises SEQ ID NO: 3106 at its 3′ end. In some embodiments, the editing template comprises at its 3′ end any one of SEQ ID NOs: 3107-3123. In some embodiments, the editing template is 10 to 40 nucleotides in length. In some embodiments, the editing template is 27 to 33 nucleotides in length. In some embodiments, the PBS comprises at its 5′ end a sequence corresponding to sequence number 3091. In some embodiments, the PBS comprises a sequence corresponding to any one of sequence numbers 3091-3095 or any one of SEQ ID Nos: 3096-3105. In some embodiments, the PBS is 8 to 14 nucleotides in length. In some embodiments, the gRNA core comprises SEQ ID NO: 3666. In some embodiments, a PEgRNA sequence comprises any one of SEQ ID NOs: 3124-3155. In some embodiments, the spacer, the gRNA core, the editing template, and the PBS form a contiguous sequence in a single molecule. In some embodiments, the PEgRNA comprises from 5′ to 3′, the spacer, the gRNA core, the editing template, and the PBS. In some embodiments, the PEgRNA further comprises 3′ mN*mN*mN*N and 5′mN*mN*mN* modifications, where m indicates that the nucleotide contains a 2′-O-Me modification and a * indicates the presence of a phosphorothioate bond. In some embodiments, the PEgRNA further comprises 3′ mT*mT*mT*T and 5′mN*mN*mN* modifications, where m indicates that the nucleotide contains a 2′-O-Me modification, a * indicates the presence of a phosphorothioate bond, and a T indicates the presence of an additional uridine nucleotide.

[0015] In one aspect, provided herein is a prime editing guide RNA (PEgRNA), or a nucleic acid encoding the PEgRNA, wherein the PEgRNA comprises: a) a spacer comprising at its 3′ end SEQ ID NO: 3086; b) a gRNA core capable of binding to a Cas9 protein; and c) an extension arm comprising: i) an editing template comprising at its 3′ end SEQ ID NO: 3106, and ii) a primer binding site (PBS) comprising at its 5′ end a sequence that is a reverse complement of nucleotides 10-14 of SEQ ID NO: 3086. In some embodiments, the spacer comprises at its 3′ end any one of SEQ ID NOs: 3087, 3088, 2619, 3089, or 3090. In some embodiments, the spacer comprises at its 3′ end SEQ ID NO: 2619. In some embodiments, the editing template comprises SEQ ID NO: 3106 at its 3′ end. In some embodiments, the editing template comprises at its 3′ end any one of SEQ ID NOs: 3107-3123. In some embodiments, the editing template is 10 to 40 nucleotides in length. In some embodiments, the editing template is 27 to 33 nucleotides in length. In some embodiments, the PBS comprises at its 5′ end a sequence corresponding to sequence number 3091. In some embodiments, the PBS comprises a sequence corresponding to any one of sequence numbers 3091-3095 or any one of SEQ ID Nos: 3096-3105. In some embodiments, the PBS is 8 to 14 nucleotides in length. In some embodiments, the gRNA core comprises SEQ ID NO: 3666. In some embodiments, a PEgRNA sequence comprises any one of SEQ ID NOs: 3124-3155. In some embodiments, the spacer, the gRNA core, the editing template, and the PBS form a contiguous sequence in a single molecule. In some embodiments, the PEgRNA comprises from 5′ to 3′, the spacer, the gRNA core, the editing template, and the PBS. In some embodiments, the PEgRNA further comprises 3′ mN*mN*mN*N and 5′mN*mN*mN* modifications, where m indicates that the nucleotide contains a 2′-O-Me modification and a * indicates the presence of a phosphorothioate bond. In some embodiments, the PEgRNA further comprises 3′ mT*mT*mT*T and 5′mN*mN*mN* modifications, where m indicates that the nucleotide contains a 2′-O-Me modification, a * indicates the presence of a phosphorothioate bond, and a T indicates the presence of an additional uridine nucleotide.

[0016] In one aspect, provided herein is a prime editing system comprising: (a) the PEgRNA or the nucleic acid encoding the PEgRNA of any one of the aspects or embodiments herein, and (b) a ngRNA, or a nucleic acid encoding the ngRNA, wherein the ngRNA comprises: (i) a spacer comprising at its 3′ end a sequence corresponding to nucleotides 4-20 of any one of SEQ ID NOs: 2559, 2561, 2569, 2573, or 2885-2896; and (ii) an ngRNA core capable of binding a Cas9 protein. In some embodiments, the spacer of the ngRNA comprises at its 3′ end any one of SEQ ID NOs: 2559, 2561, 2569, 2573, or 2885-2896. In some embodiments, the ngRNA core comprises the same sequence as the gRNA core. In some embodiments, the ngRNA core comprises SEQ ID NO: 3666. In some embodiments, the ngRNA comprises any one of SEQ ID NOs: 2897-2900. In some embodiments, the PEgRNA and the ngRNA further comprise 3′ mN*mN*mN*N and 5′mN*mN*mN* modifications, where m indicates that the nucleotide contains a 2′-O-Me modification and a * indicates the presence of a phosphorothioate bond. In some embodiments, the PEgRNA and the ngRNA further comprise 3′ mT*mT*mT*T and 5′mN*mN*mN* modifications, where m indicates that the nucleotide contains a 2′-O-Me modification, a * indicates the presence of a phosphorothioate bond, and a T indicates the presence of an additional uridine nucleotide. In some embodiments, the prime editing system further comprises: (c) a prime editor comprising a Cas9 nickase comprising a nuclease inactivating mutation in a HNH domain, or a nucleic acid encoding the Cas9 nickase, and a reverse transcriptase, or a nucleic acid encoding the reverse transcriptase. In some embodiments, the prime editor is a fusion protein. In some embodiments, the prime editing system further comprises: (c) an N-terminal extein comprising an N-terminal fragment of a prime editor fusion protein and an N-intein or a nucleic acid encoding the N-terminal extein; and (d) a C-terminal extein comprising a C-terminal fragment of the prime editor fusion protein and a C-intein, or a nucleic acid encoding the C-terminal extein; wherein the N-intein and the C-intein of the N-terminal and C-terminal exteins are capable of self-excision to join the N-terminal fragment and the C-terminal fragment to form the prime editor fusion protein, and wherein the prime editor fusion protein comprises a Cas9 nickase comprising a nuclease inactivating mutation in a HNH domain and a reverse transcriptase. In some embodiments, the Cas9 nickase comprises an amino acid sequence comprising at least 80%, 85%, 90%, 95%, 96%, 97%, 98%, 99%, or 100% sequence identity to SEQ ID NO: 3695 or SEQ ID NO: 3696. In some embodiments, the reverse transcriptase comprises an amino acid sequence comprising at least 80%, 85%, 90%, 95%, 96%, 97%, 98%, 99%, or 100% sequence identity to SEQ ID NO: 3692. In some embodiments, the sequence identities are determined by Needleman-Wunsch alignment of two protein sequences with Gap Costs set to Existence: 11 Extension: 1 where percent identity is calculated by dividing the number of identities by the length of the alignment. In some embodiments, the nucleic acid encoding the Cas9 nickase, and/or the nucleic acid encoding the reverse transcriptase are mRNA.

[0017] In some embodiments, the spacer, the gRNA core, the editing template, and the PBS form a contiguous sequence in a single molecule. In some embodiments, the PEgRNA comprises from 5′ to 3′, the spacer, the gRNA core, the editing template, and the PBS. In some embodiments, the PEgRNA further comprises 3′ mN*mN*mN*N and 5′mN*mN*mN* modifications, where m indicates that the nucleotide contains a 2′-O-Me modification and a * indicates the presence of a phosphorothioate bond. In some embodiments, the PEgRNA further comprises 3′ mT*mT*mT*T and 5′mN*mN*mN* modifications, where m indicates that the nucleotide contains a 2′-O-Me modification, a * indicates the presence of a phosphorothioate bond, and a T indicates the presence of an additional uridine nucleotide.

[0018] In some embodiments, the PEgRNA and the ngRNA further comprise 3′ mN*mN*mN*N and 5′mN*mN*mN* modifications, where m indicates that the nucleotide contains a 2′-O-Me modification and a * indicates the presence of a phosphorothioate bond. In some embodiments, the PEgRNA and the ngRNA further comprise 3′ mT*mT*mT*T and 5′mN*mN*mN* modifications, where m indicates that the nucleotide contains a 2′-O-Me modification, a * indicates the presence of a phosphorothioate bond, and a T indicates the presence of an additional uridine nucleotide. In some embodiments, the prime editing system further comprises: (c) a prime editor comprising a Cas9 nickase comprising a nuclease inactivating mutation in a HNH domain, or a nucleic acid encoding the Cas9 nickase, and a reverse transcriptase, or a nucleic acid encoding the reverse transcriptase. In some embodiments, the prime editor is a fusion protein. In some embodiments, the prime editing system further comprises: (c) an N-terminal extein comprising an N-terminal fragment of a prime editor fusion protein and an N-intein or a nucleic acid encoding the N-terminal extein; and (d) a C-terminal extein comprising a C-terminal fragment of the prime editor fusion protein and a C-intein, or a nucleic acid encoding the C-terminal extein; wherein the N-intein and the C-intein of the N-terminal and C-terminal exteins are capable of self-excision to join the N-terminal fragment and the C-terminal fragment to form the prime editor fusion protein, and wherein the prime editor fusion protein comprises a Cas9 nickase comprising a nuclease inactivating mutation in a HNH domain and a reverse transcriptase. In some embodiments, the Cas9 nickase comprises an amino acid sequence comprising at least 80%, 85%, 90%, 95%, 96%, 97%, 98%, 99%, or 100% sequence identity to SEQ ID NO: 3695 or SEQ ID NO: 3696. In some embodiments, the reverse transcriptase comprises an amino acid sequence comprising at least 80%, 85%, 90%, 95%, 96%, 97%, 98%, 99%, or 100% sequence identity to SEQ ID NO: 3692. In some embodiments, the sequence identities are determined by Needleman-Wunsch alignment of two protein sequences with Gap Costs set to Existence: 11 Extension: 1 where percent identity is calculated by dividing the number of identities by the length of the alignment. In some embodiments, the nucleic acid encoding the Cas9 nickase, and/or the nucleic acid encoding the reverse transcriptase are mRNA.

[0019] In one aspect, provided herein is a prime editing system comprising: (a) the PEgRNA of any one of the aspects or embodiments herein, or the nucleic acid encoding the PEgRNA; and (b) a prime editor comprising a Cas9 nickase comprising a nuclease inactivating mutation in the HNH domain, or a nucleic acid encoding the Cas9 nickase, and a reverse transcriptase, or a nucleic acid encoding the reverse transcriptase. In some embodiments, the Cas9 nickase comprises an amino acid sequence comprising at least 80%, 85%, 90%, 95%, 96%, 97%, 98%, 99%, or 100% sequence identity to SEQ ID NO: 3695 or SEQ ID NO: 3696. In some embodiments, the reverse transcriptase comprises an amino acid sequence comprising at least 80%, 85%, 90%, 95%, 96%, 97%, 98%, 99%, or 100% sequence identity to SEQ ID NO: 3692. In some embodiments, the sequence identities are determined by Needleman-Wunsch alignment of two protein sequences with Gap Costs set to Existence: 11 Extension: 1 where percent identity is calculated by dividing the number of identities by the length of the alignment. In some embodiments, the nucleic acid encoding the Cas9 nickase, and/or the nucleic acid encoding the reverse transcriptase are mRNA.

[0020] In one aspect, provided herein is a prime editing system comprising: (a) the PEgRNA of any one of the aspects or embodiments herein, or the nucleic acid encoding the PEgRNA; (b) an N-terminal extein comprising an N-terminal fragment of a prime editor fusion protein and an N-intein or a nucleic acid encoding the N-terminal extein; and (c) a C-terminal extein comprising a C-terminal fragment of the prime editor fusion protein and a C-intein, or a nucleic acid encoding the C-terminal extein; wherein the N-intein and the C-intein of the N-terminal and C-terminal exteins are capable of self-excision to join the N-terminal fragment and the C-terminal fragment to form the prime editor fusion protein, and wherein the prime editor fusion protein comprises a Cas9 nickase comprising a nuclease inactivating mutation in a HNH domain and a reverse transcriptase. In some embodiments, the Cas9 nickase comprises an amino acid sequence comprising at least 80%, 85%, 90%, 95%, 96%, 97%, 98%, 99%, or 100% sequence identity to SEQ ID NO: 3695 or SEQ ID NO: 3696. In some embodiments, the reverse transcriptase comprises an amino acid sequence comprising at least 80%, 85%, 90%, 95%, 96%, 97%, 98%, 99%, or 100% sequence identity to SEQ ID NO: 3692. In some embodiments, the sequence identities are determined by Needleman-Wunsch alignment of two protein sequences with Gap Costs set to Existence: 11 Extension: 1 where percent identity is calculated by dividing the number of identities by the length of the alignment. In some embodiments, the nucleic acid encoding the Cas9 nickase, and/or the nucleic acid encoding the reverse transcriptase are mRNA.

[0021] In one aspect, provided herein is a population of viral particles collectively comprising the one or more nucleic acids encoding the prime editing system of any one of the aspects or embodiments herein. In some embodiments, the viral particles are AAV particles.

[0022] In one aspect, provided herein is a LNP comprising the prime editing system of any one of the aspects or embodiments herein. In some embodiments, the PEgRNA, the nucleic acid encoding the Cas9 nickase, and the nucleic acid encoding the reverse transcriptase. In some embodiments, the nucleic acid encoding the Cas9 nickase and the nucleic acid encoding the reverse transcriptase are mRNA. In some embodiments, the nucleic acid encoding the Cas9 nickase and the nucleic acid encoding the reverse transcriptase are the same molecule.

[0023] In one aspect, provided herein is a method of correcting or editing a FANCC gene, the method comprising contacting the FANCC gene with: (a) the PEgRNA of any one of the aspects or embodiments herein and a prime editor comprising a Cas9 nickase comprising a nuclease inactivating mutation in a HNH domain and a reverse transcriptase, (b) the prime editing system of any one of the aspects or embodiments herein, (c) the population of viral particles of any one of the aspects or embodiments herein, or (d) the LNP of any one of the aspects or embodiments herein. In some embodiments, the FANCC gene is in a cell. In some embodiments, the FANCC gene comprises a mutation relative to a corresponding wild-type FANCC gene. In some embodiments, the mutation is c.67del or c.456+4A->T. In some embodiments, the cell is a mammalian cell. In some embodiments, the cell is a human cell. In some embodiments, the cell is a primary cell. In some embodiments, the cell is a hematopoietic stem cell or a hematopoietic pluripotent stem cell. In some embodiments, the cell is in a subject. In some embodiments, the subject is a human. In some embodiments, the cell is from a subject having Fanconi Anemia. In some embodiments, the cell is an allogeneic cell.

[0024] In one aspect, provided herein is a cell generated by the method of any one of the aspects or embodiments herein.

[0025] In one aspect, provided herein is a population of cells generated by the method of any one of the aspects or embodiments herein.

[0026] In one aspect, provided herein is a method for treating Fanconi Anemia in a subject in need thereof, the method comprising administering to the subject: (a) the PEgRNA of any one of the aspects or embodiments herein and a prime editor comprising a Cas9 nickase comprising a nuclease inactivating mutation in a HNH domain and a reverse transcriptase, (b) the prime editing system of any one of the aspects or embodiments herein, (c) the cell of any one of the aspects or embodiments herein, or (d) the population of cells of any one of the aspects or embodiments herein. In some embodiments, the subject is a human.

[0027] In one aspect, provided herein is a prime editing guide RNA (PEgRNA) or a nucleic acid encoding the PEgRNA comprising: a) a spacer comprising at its 3′ end a PEgRNA spacer sequence selected from any one of Tables 1-52; b) a gRNA core capable of binding to a Cas9 protein, and c) an extension arm comprising: i) an editing template comprising at its 3′ end an RTT sequence selected from the same Table as the PEgRNA Spacer sequence, and ii) a primer binding site (PBS) comprising at its 5′ end a PBS sequence selected from the same Table as the PEgRNA Spacer sequence. In some embodiments, the spacer of the PEgRNA is from 17 to 22 nucleotides in length. In some embodiments, the spacer of the PEgRNA is 20 nucleotides in length. In some embodiments, the editing template has a length of 40 nucleotides or less. In some embodiments, the editing template has a length of 10 to 32 nucleotides. In some embodiments, the editing template is 12 to 16 nucleotides in length. In some embodiments, the editing template is 11 to 20 nucleotides in length. In some embodiments, the PBS is 8 to 14 nucleotides in length. In some embodiments, the PBS is 11 to 12 nucleotides in length. In some embodiments, the gRNA core comprises SEQ ID NO: 3666. In one aspect, provided herein is a prime editing system comprising: (a) the PEgRNA or the nucleic acid encoding the PEgRNA of any one of the aspects or embodiments herein; and (b) a nick guide RNA (ngRNA), or a nucleic acid encoding the ngRNA, wherein the ngRNA comprises a spacer comprising at its 3′ end nucleotides 4-20 of any ngRNA spacer sequence selected from the same Table as the PEgRNA spacer sequence, and an ngRNA core capable of binding to a Cas9 protein. In some embodiments, the spacer of the ngRNA is 17 to 22 nucleotides in length. In some embodiments, the spacer of the ngRNA comprises at its 3′ end nucleotides 3-20, 2-20, or 1-20 of the ngRNA spacer sequence selected from the same Table as the PEgRNA Spacer sequence. In some embodiments, the spacer of the ngRNA comprises at its 3′ end the ngRNA spacer sequence selected from the same Table as the PEgRNA Spacer sequence. In some embodiments, the ngRNA core comprises the same sequence as the gRNA core. In some embodiments, the ngRNA core comprises SEQ ID NO: 3666. In some embodiments, the prime editing system further comprises: (c) a prime editor comprising a Cas9 nickase comprising a nuclease inactivating mutation in a HNH domain, or a nucleic acid encoding the Cas9 nickase, and a reverse transcriptase, or a nucleic acid encoding the reverse transcriptase. In some embodiments, the prime editor is a fusion protein. In some embodiments, the prime editing system further comprises: (c) an N-terminal extein comprising an N-terminal fragment of a prime editor fusion protein and an N-intein or a nucleic acid encoding the N-terminal extein; and (d) a C-terminal extein comprising a C-terminal fragment of the prime editor fusion protein and a C-intein, or a nucleic acid encoding the C-terminal extein; wherein the N-intein and the C-intein of the N-terminal and C-terminal exteins are capable of self-excision to join the N-terminal fragment and the C-terminal fragment to form the prime editor fusion protein, and wherein the prime editor fusion protein comprises a Cas9 nickase comprising a nuclease inactivating mutation in a HNH domain and a reverse transcriptase. In one aspect, provided herein is a prime editing system comprising: (a) the PEgRNA of any one of aspects or embodiments herein, or the nucleic acid encoding the PEgRNA; and (b) a prime editor comprising a Cas9 nickase comprising a nuclease inactivating mutation in the HNH domain, or a nucleic acid encoding the Cas9 nickase, and a reverse transcriptase, or a nucleic acid encoding the reverse transcriptase. In one aspect, provided herein is a prime editing system comprising: (a) the PEgRNA of any one of the aspects or embodiments herein, or the nucleic acid encoding the PEgRNA; (b) an N-terminal extein comprising an N-terminal fragment of a prime editor fusion protein and an N-intein or a nucleic acid encoding the N-terminal extein; and (c) a C-terminal extein comprising a C-terminal fragment of the prime editor fusion protein and a C-intein, or a nucleic acid encoding the C-terminal extein; wherein the N-intein and the C-intein of the N-terminal and C-terminal exteins are capable of self-excision to join the N-terminal fragment and the C-terminal fragment to form the prime editor fusion protein, and wherein the prime editor fusion protein comprises a Cas9 nickase comprising a nuclease inactivating mutation in a HNH domain and a reverse transcriptase. In some embodiments, the Cas9 nickase comprises an amino acid sequence comprising at least 80%, 85%, 90%, 95%, 96%, 97%, 98%, 99%, or 100% sequence identity to SEQ ID NO: 3695 or SEQ ID NO: 3696. In some embodiments, the reverse transcriptase comprises an amino acid sequence comprising at least 80%, 85%, 90%, 95%, 96%, 97%, 98%, 99%, or 100% sequence identity to SEQ ID NO: 3692. In some embodiments, the sequence identities are determined by Needleman-Wunsch alignment of two protein sequences with Gap Costs set to Existence: 11 Extension: 1 where percent identity is calculated by dividing the number of identities by the length of the alignment.

### INCORPORATION BY REFERENCE

[0028] All publications, patents, and patent applications mentioned in this specification are herein incorporated by reference to the same extent as if each individual publication, patent, or patent application was specifically and individually indicated to be incorporated by reference.

### BRIEF DESCRIPTION OF THE DRAWINGS

[0029] The novel features of the disclosure are set forth with particularity in the appended claims. A better understanding of the features and advantages of the present disclosure will be obtained by reference to the following detailed description that sets forth illustrative embodiments, in which the principles of the disclosure are utilized, and the accompanying drawings of which:

[0030] FIG. 1 depicts a schematic of a prime editing guide RNA (PEgRNA) binding to a double stranded target DNA sequence.

[0031] FIG. 2 depicts a PEgRNA architectural overview in an exemplary schematic of PEgRNA designed for a prime editor.

[0032] FIG. 3 is a schematic showing the spacer and gRNA core part of an exemplary guide RNA, in two separate molecules. The rest of the PEgRNA structure is not shown.

### DETAILED DESCRIPTION

[0033] Provided herein, in some embodiments, are compositions and methods to edit the target gene FANCC with prime editing. In certain embodiments, provided herein are compositions and methods for correction of mutations in the Fanconi anemia, complementation group C (FANCC) gene associated with Fanconi anemia. Compositions provided herein can comprise prime editors (PEs) that can use engineered guide polynucleotides, e.g., prime editing guide RNAs (PEgRNAs), that can direct PEs to specific DNA targets and can encode DNA edits on the target gene FANCC that serve a variety of functions, including direct correction of disease-causing mutations.

[0034] The following description and examples illustrate embodiments of the present disclosure in detail. It is to be understood that this disclosure is not limited to the particular embodiments described herein and as such can vary. Those of skill in the art will recognize that there are numerous variations and modifications of this disclosure, which are encompassed within its scope. Although various features of the present disclosure can be described in the context of a single embodiment, the features can also be provided separately or in any suitable combination. Conversely, although the present disclosure can be described herein in the context of separate embodiments for clarity, the present disclosure can also be implemented in a single embodiment.

### Definitions

[0035] Unless defined otherwise, all technical and scientific terms used herein have the same meaning as is commonly understood by one of ordinary skill in the art.

[0036] The terminology used herein is for the purpose of describing particular embodiments only and is not intended to be limiting. As used herein, the singular forms “a”, “an” and “the” are intended to include the plural forms as well, unless the context clearly indicates otherwise. Furthermore, to the extent that the terms “including”, “includes”, “having”, “has”, “with”, or variants thereof as used herein mean “comprising”.

[0037] Unless otherwise specified, the words “comprising”, “comprise”, “comprises”, “having”, “have”, “has”, “including”, “includes”, “include”, “containing”, “contains” and “contain” are inclusive or open-ended and do not exclude additional, unrecited elements or method steps.

[0038] Reference to “some embodiments”, “an embodiment”, “one embodiment”, or “other embodiments” means that a particular feature or characteristic described in connection with the embodiments is included in at least one or more embodiments, but not necessarily all embodiments, of the present disclosure.

[0039] The term “about” or “approximately” in relation to a numerical means, a range of values that fall within 10% greater than or less than the value. For example, about x means x±(10% * x).

[0040] In some embodiments, the cell is a human cell. A cell can be of or derived from different tissues, organs, and/or cell types. In some embodiments, the cell is a primary cell. As used herein, the term “primary cell” means a cell isolated from an organism, e.g., a mammal, which is grown in tissue culture (i.e., in vitro) for the first time before subdivision and transfer to a subculture. In some embodiments, the cell is a stem cell. In some non-limiting examples, mammalian cells, including primary cells and stem cells, can be modified through introduction of one or more polynucleotides, polypeptide, and/or prime editing compositions (e.g., through transfection, transduction, electroporation, and the like) and further passaged. Such modified cells include hematopoietic stem cells (HSCs), hematopoietic stem progenitor cells (HSPC)s, fibroblasts, keratinocytes, epithelial cells (e.g., mammary epithelial cells, intestinal epithelial cells, hepatocytes), endothelial cells, glial cells, neural cells, formed elements of the blood (e.g., lymphocytes, bone marrow cells), muscle cells, precursors of any of these somatic cell types, and stem cells. In some embodiments, the cell is a fibroblast. In some embodiments, the cell is a stem cell. In some embodiments, the cell is a progenitor cell. In some embodiments, the cell is a pluripotent cell (e.g., a pluripotent stem cell) In some embodiments, the cell (e.g., a stem cell) is an embryonic stem cell, tissue-specific stem cell, mesenchymal stem cell, or an induced pluripotent stem cell. In some embodiments, the cell is an induced pluripotent stem cell (iPSC). In some embodiments, the cell is an embryonic stem cell (ESC).

[0041] In some embodiments, the cell is a human stem cell. In some embodiments, the cell is a human pluripotent stem cell. In some embodiments, the cell is a human fibroblast. In some embodiments, the cell is an induced human pluripotent stem cell. In some embodiments, the cell is a human stem cell. In some embodiments, the cell is a human embryonic stem cell.

[0042] In some embodiments, the cell is a human HSPC (also referred to as a CD34+ cell). In some embodiments, the cell is a hematopoietic stem cell (HSC). In some embodiments, the cell is a hematopoietic progenitor cell (HPC). In some embodiments, hematopoietic stem cells and hematopoietic progenitor cells are referred to as hematopoietic stem or progenitor cells (HSPCs). In some embodiments, the cell is a human HSC. In some embodiments, the cell is a human HPC. In some embodiments, the cell is a human HSPC. In some embodiments, the cell is a long term (LT)-HSC. In some embodiments, the cell is a short-term (ST)-HSC. In some embodiments, the cell is a myeloid progenitor cell. In some embodiments, the cell is a lymphoid progenitor cell. In some embodiments, the cell is a granulocyte monocyte progenitor cell. In some embodiments, the cell is a megakaryocyte erythroid progenitor cell. In some embodiments, the cell is a multipotent progenitor cell (MPP).

[0043] In some embodiments, a cell is not isolated from an organism but forms part of a tissue or organ of an organism, e.g., a mammal. In some non-limiting examples, mammalian cells include muscle cells (e.g., cardiac muscle cells, smooth muscle cells, myosatellite cells), epithelial cells (e.g., mammary epithelial cells, intestinal epithelial cells, hepatocytes), endothelial cells, glial cells, neural cells, formed elements of the blood (e.g., lymphocytes, bone marrow cells, lymphoblastoids), precursors of any of these somatic cell types, and stem cells.

[0044] In some embodiments, a cell is isolated from an organism. In some embodiments, a cell is derived from an organism. In some embodiments, a cell is a differentiated cell. In some embodiments, the cell is a fibroblast. In some embodiments, the cell is differentiated from an induced pluripotent stem cell. In some embodiments, the cell is differentiated from an HSC or an HPSC. In some embodiments, the cell is differentiated from an induced pluripotent stem cell (iPSC). In some embodiments, the cell is differentiated from an embryonic stem cell (ESC).

[0045] In some embodiments, the cell is a differentiated human cell. In some embodiments, cell is a human fibroblast. In some embodiments, the cell is differentiated from an induced human pluripotent stem cell. In some embodiments, the cell is differentiated from a human iPSC or a human ESC.

[0046] In some embodiments, the cell comprises a prime editor, a PEgRNA, or a prime editing composition disclosed herein. In some embodiments, the cell is from a human subject. In some embodiments, the human subject has a disease or condition, or is at a risk of developing a disease or a condition associated with a mutation to be corrected by prime editing, for example, Fanconi Anemia. In some embodiments, the cell comprises a mutation associated with Fanconi anemia. In some embodiments, the cell comprises a mutation in a FANCC gene. In some embodiments, the cell is from a human subject, and comprises a prime editor, a PEgRNA, or a prime editing composition for correction of the mutation. In some embodiments, the cell is from the human subject, and the mutation has been edited or corrected by prime editing. In some embodiments, the cell is in a human subject. In some embodiments, the cell comprises a prime editor or a prime editing composition for correction of the mutation. In some embodiments, the cell is in a human subject, and comprises a prime editor or a prime editing composition for correction of the mutation. In some embodiments, the cell is from a human subject. In some embodiments, the cell is from a human subject having Fanconi anemia, wherein the human subject has at least a copy of a FANCC gene that comprises a mutation associated with Fanconi anemia, optionally wherein the human subject has two copies of a FANCC gene, each of which comprises a mutation associated with Fanconi anemia. In some embodiments, the cell comprises at least a copy of, or two copies of, FANCC gene that encodes a functional FANCC protein. In some embodiments, the cell comprises at least a copy, or two copies of, FANCC gene that has the sequence of a wild type FANCC gene. In some embodiments, the cell comprises a prime editor, a PEgRNA, or a prime editing composition. In some embodiments, the mutation in the cell has been edited or corrected by prime editing. In some embodiments, the cell is from the human subject and the mutation has been edited or corrected by prime editing.

[0047] The term “substantially” as used herein can refer to a value approaching 100% of a given value. In some embodiments, the term can refer to an amount that can be at least about 70%, 80%, 90%, 91%, 92%, 93%, 94%, 95%, 96%, 97%, 98%, 99%, 99.9%, or 99.99% of a total amount. In some embodiments, the term can refer to an amount that can be about 100% of a total amount.

[0048] The terms “protein” and “polypeptide” can be used interchangeably to refer to a polymer of two or more amino acids joined by covalent bonds (e.g., an amide bond) that can adopt a three-dimensional conformation. In some embodiments, a protein or polypeptide comprises at least 10 amino acids, 15 amino acids, 20 amino acids, 30 amino acids or 50 amino acids joined by covalent bonds (e.g., amide bonds). In some embodiments, a protein comprises at least two amide bonds. In some embodiments, a protein comprises multiple amide bonds. In some embodiments, a protein comprises an enzyme, enzyme precursor proteins, regulatory protein, structural protein, receptor, nucleic acid binding protein, a biomarker, a member of a specific binding pair (e.g., a ligand or aptamer), or an antibody. In some embodiments, a protein can be a full-length protein (e.g., a fully processed protein having certain biological function). In some embodiments, a protein can be a variant or a fragment of a full-length protein. For example, in some embodiments, a Cas9 protein domain comprises an H840A amino acid substitution compared to a naturally occurring S. pyogenes Cas9 protein. A variant of a protein or enzyme, for example a variant reverse transcriptase, comprises a polypeptide having an amino acid sequence that is about 60% identical, about 70% identical, about 80% identical, about 90% identical, about 95% identical, about 96% identical, about 97% identical, about 98% identical, about 99% identical, about 99.5% identical, or about 99.9% identical to the amino acid sequence of a reference protein.

[0049] In some embodiments, a protein comprises one or more protein domains or subdomains. As used herein, the term “polypeptide domain”, “protein domain”, or “domain” when used in the context of a protein or polypeptide, refers to a polypeptide chain that has one or more biological functions, e.g., a catalytic function, a protein-protein binding function, or a protein-DNA function. In some embodiments, a protein comprises multiple protein domains. In some embodiments, a protein comprises multiple protein domains that are naturally occurring. In some embodiments, a protein comprises multiple protein domains from different naturally occurring proteins. For example, in some embodiments, a prime editor can be a fusion protein comprising a Cas9 protein domain of S. pyogenes and a reverse transcriptase protein domain of a retrovirus (e.g., Moloney murine leukemia virus) or a variant of the retrovirus. A protein that comprises amino acid sequences from different origins or naturally occurring proteins can be referred to as a fusion, or chimeric protein.

[0050] In some embodiments, a protein comprises a functional variant or functional fragment of a full-length wild type protein. A “functional fragment” or “functional portion”, as used herein, refers to any portion of a reference protein (e.g., a wild type protein) that encompasses less than the entire amino acid sequence of the reference protein while retaining one or more of the functions, e.g., catalytic or binding functions. For example, a functional fragment of a reverse transcriptase can encompass less than the entire amino acid sequence of a wild type reverse transcriptase, but retains the ability under at least one set of conditions to catalyze the polymerization of a polynucleotide. When the reference protein is a fusion of multiple functional domains, a functional fragment thereof can retain one or more of the functions of at least one of the functional domains. For example, a functional fragment of a Cas9 can encompass less than the entire amino acid sequence of a wild type Cas9, but retains its DNA binding ability and lacks its nuclease activity partially or completely.

[0051] A “functional variant” or “functional mutant”, as used herein, refers to any variant or mutant of a reference protein (e.g., a wild type protein) that encompasses one or more alterations to the amino acid sequence of the reference protein while retaining one or more of the functions, e.g., catalytic or binding functions. In some embodiments, the one or more alterations to the amino acid sequence comprises amino acid substitutions, insertions or deletions, or any combination thereof. In some embodiments, the one or more alterations to the amino acid sequence comprises amino acid substitutions. For example, a functional variant of a reverse transcriptase can comprise one or more amino acid substitutions compared to the amino acid sequence of a wild type reverse transcriptase, but retains the ability under at least one set of conditions to catalyze the polymerization of a polynucleotide. When the reference protein is a fusion of multiple functional domains, a functional variant thereof can retain one or more of the functions of at least one of the functional domains. For example, in some embodiments, a functional fragment of a Cas9 can comprise one or more amino acid substitutions in a nuclease domain, e.g., a H840A amino acid substitution, compared to the amino acid sequence of a wild type Cas9, but retains the DNA binding ability and lacks the nuclease activity partially or completely.

[0052] The term “function” and its grammatical equivalents as used herein refer to a capability of operating, having, or serving an intended purpose. Functional can comprise any percent from baseline to 100% of an intended purpose. For example, functional can comprise or comprise about 5%, 10%, 15%, 20%, 25%, 30%, 35%, 40%, 45%, 50%, 55%, 60%, 65%, 70%, 75%, 80%, 85%, 90%, 95%, or up to about 100% of an intended purpose. In some embodiments, the term functional can mean over or over about 100% of normal function, for example, 125%, 150%, 175%, 200%, 250%, 300%, 400%, 500%, 600%, 700% or up to about 1000% of an intended purpose.

[0053] In some embodiments, a protein or polypeptides includes naturally occurring amino acids (e.g., one of the twenty amino acids commonly found in peptides synthesized in nature, and known by the one letter abbreviations A, R, N, C, D, Q, E, G, H, I, L, K, M, F, P, S, T, W, Y and V). In some embodiments, a protein or polypeptides includes non-naturally occurring amino acids (e.g., amino acids which is not one of the twenty amino acids commonly found in peptides synthesized in nature, including synthetic amino acids, amino acid analogs, and amino acid mimetics). In some embodiments, a protein or polypeptide is modified.

[0054] In some embodiments, a protein comprises an isolated polypeptide. The term “isolated” means free or removed to varying degrees from components which normally accompany it as found in the natural state or environment. For example, a polypeptide naturally present in a living animal is not isolated, and the same polypeptide partially or completely separated from the coexisting materials of its natural state is isolated.

[0055] In some embodiments, a protein is present within a cell, a tissue, an organ, or a virus particle. In some embodiments, a protein is present within a cell or a part of a cell (e.g., a bacteria cell, a plant cell, or an animal cell). In some embodiments, the cell is in a tissue, in a subject, or in a cell culture. In some embodiments, the cell is a microorganism (e.g., a bacterium, fungus, protozoan, or virus). In some embodiments, a protein is present in a mixture of analytes (e.g., a lysate). In some embodiments, the protein is present in a lysate from a plurality of cells or from a lysate of a single cell.

[0056] The terms “homologous,” “homology,” or “percent homology” as used herein refer to the degree of sequence identity between an amino acid and a corresponding reference amino acid sequence, or a polynucleotide sequence and a corresponding reference polynucleotide sequence. “Homology” can refer to polymeric sequences, e.g., polypeptide or DNA sequences that are similar. Homology can mean, for example, nucleic acid sequences with at least about: 50%, 55%, 60%, 65%, 70%, 75%, 80%, 81%, 82%, 83%, 84%, 85%, 86%, 87%, 88%, 89%, 90%, 91%, 92%, 93%, 94%, 95%, 96%, 97%, 98%, 99%, or 100% identity. In other embodiments, a “homologous sequence” of nucleic acid sequences can exhibit 93%, 95% or 98% sequence identity to the reference nucleic acid sequence. For example, a “region of homology to a genomic region” can be a region of DNA that has a similar sequence to a given genomic region in the genome. A region of homology can be of any length that is sufficient to promote binding of a spacer, a primer binding site, or a protospacer sequence to the genomic region. For example, the region of homology can comprise at least 5, 10, 11, 12, 13, 14, 15, 16, 17, 18, 19, 20, 21, 22, 23, 24, 25, 30, 35, 40, 45, 50, 55, 60, 65, 70, 75, 80, 85, 90, 95, 100, 200, 300, 400, 500, 600, 700, 800, 900, 1000, 1100, 1200, 1300, 1400, 1500, 1600, 1700, 1800, 1900, 2000, 2100, 2200, 2300, 2400, 2500, 2600, 2700, 2800, 2900, 3000, 3100 or more bases in length such that the region of homology has sufficient homology to undergo binding with the corresponding genomic region.

[0057] When a percentage of sequence homology or identity is specified, in the context of two nucleic acid sequences or two polypeptide sequences, the percentage of homology or identity generally refers to the alignment of two or more sequences across a portion of their length when compared and aligned for maximum correspondence. When a position in the compared sequence can be occupied by the same base or amino acid, then the molecules can be homologous at that position. Unless stated otherwise, sequence homology or identity is assessed over the specified length of the nucleic acid, polypeptide or portion thereof. In some embodiments, the homology or identity is assessed over a functional portion or specified portion of the length.

[0058] Alignment of sequences for assessment of sequence homology can be conducted by algorithms known in the art, such as the Basic Local Alignment Search Tool (BLAST) algorithm, which is described in Altschul et al, J. Mol. Biol. 215:403-410, 1990. A publicly available, internet interface, for performing BLAST analyses is accessible through the National Center for Biotechnology Information. Additional known algorithms include those published in: Smith & Waterman, “Comparison of Biosequences”, Adv. Appl. Math. 2:482, 1981; Needleman & Wunsch, “A general method applicable to the search for similarities in the amino acid sequence of two proteins” J. Mol. Biol. 48:443, 1970; Pearson & Lipman “Improved tools for biological sequence comparison”, Proc. Natl. Acad. Sci. USA 85:2444, 1988; or by automated implementation of these or similar algorithms. Global alignment programs can also be used to align similar sequences of roughly equal size. Examples of global alignment programs include NEEDLE (available at www.ebi.ac.uk/Tools/psa/emboss_needle/) which is part of the EMBOSS package (Rice P et al., Trends Genet., 2000; 16: 276-277), and the GGSEARCH program https://fasta.bioch.virginia.edu/fasta_www2/, which is part of the FASTA package (Pearson W and Lipman D, 1988, Proc. Natl. Acad. Sci. USA, 85: 2444-2448). Both of these programs are based on the Needleman-Wunsch algorithm which is used to find the optimum alignment (including gaps) of two sequences along their entire length. A detailed discussion of sequence analysis can also be found in Unit 19.3 of Ausubel et al (“Current Protocols in Molecular Biology” John Wiley & Sons Inc, 1994-1998, Chapter 15, 1998). In some embodiments, alignment between a query sequence and a reference sequence is performed with Needleman-Wunsch alignment with Gap Costs set to Existence: 11 Extension: 1 where percent identity is calculated by dividing the number of identities by the length of the alignment, as further described in Altschul et al. (“Gapped BLAST and PSI-BLAST: a new generation of protein database search programs”, Nucleic Acids Res. 25:3389-3402, 1997) and Altschul et al, (“Protein database searches using compositionally adjusted substitution matrices”, FEBS J. 272:5101-5109, 2005).

[0059] A skilled person understands that amino acid (or nucleotide) positions can be determined in homologous sequences based on alignment, for example, “H840” in a reference Cas9 sequence can correspond to H839, or another position in a Cas9 homolog.

[0060] The term “polynucleotide” or “nucleic acid molecule” can be any polymeric form of nucleotides, including DNA, RNA, a hybridization thereof, or RNA-DNA chimeric molecules. In some embodiments, a polynucleotide comprises cDNA, genomic DNA, mRNA, tRNA, rRNA, or microRNA. In some embodiments, a polynucleotide is double stranded, e.g., a double-stranded DNA in a gene. In some embodiments, a polynucleotide is single-stranded or substantially single-stranded, e.g., single-stranded DNA or an mRNA. In some embodiments, a polynucleotide is a cell-free nucleic acid molecule. In some embodiments, a polynucleotide circulates in blood. In some embodiments, a polynucleotide is a cellular nucleic acid molecule. In some embodiments, a polynucleotide is a cellular nucleic acid molecule in a cell circulating in blood.

[0061] Polynucleotides can have any three-dimensional structure. The following are nonlimiting examples of polynucleotides: a gene or gene fragment (for example, a probe, primer, EST or SAGE tag), an exon, an intron, intergenic DNA (including, without limitation, heterochromatic DNA), messenger RNA (mRNA), transfer RNA (tRNA), ribosomal RNA (rRNA), a ribozyme, cDNA, a recombinant polynucleotide, a branched polynucleotide, a plasmid, a vector, isolated DNA, isolated RNA, sgRNA, guide RNA, a nucleic acid probe, a primer, an snRNA, a long non-coding RNA, a snoRNA, a siRNA, a miRNA, a tRNA-derived small RNA (tsRNA), an antisense RNA, an shRNA, or a small rDNA-derived RNA (srRNA).

[0062] In some embodiments, a polynucleotide comprises deoxyribonucleotides, ribonucleotides or analogs thereof. In some embodiments, a polynucleotide comprises modified nucleotides, such as methylated nucleotides and nucleotide analogs. If present, modifications to the nucleotide structure can be imparted before or after assembly of the polynucleotide. The sequence of nucleotides can be interrupted by non-nucleotide components. A polynucleotide can be further modified after polymerization, such as by conjugation with a labeling component.

[0063] In some embodiments, a polynucleotide is composed of a specific sequence of four nucleotide bases: adenine (A); cytosine (C); guanine (G); thymine (T); and uracil (U) for thymine when the polynucleotide is RNA. In some embodiments, the polynucleotide can comprise one or more other nucleotide bases, such as inosine (I), which is read by the translation machinery as guanine (G).

[0064] In some embodiments, a polynucleotide can be modified. A polynucleotide, e.g., a PEgRNA, can be chemically modified with respect to the A, C, G, T and U nucleotides. In some embodiments, modifications can be on the nucleoside base and/or sugar portion of the nucleosides that comprise the polynucleotide. In some embodiments, the modification can be on the internucleoside linkage (e.g., phosphate backbone). In some embodiments, multiple modifications are included in the modified nucleic acid molecule. In some embodiments, a single modification is included in the modified nucleic acid molecule.

[0065] The term “complement”, “complementary”, or “complementarity” as used herein, refers to the ability of two polynucleotide molecules to base pair with each other. Complementary polynucleotides can base pair via hydrogen bonding, which can be Watson Crick, Hoogsteen or reversed Hoogsteen hydrogen bonding. For example, an adenine on one polynucleotide molecule will base pair to a thymine or an uracil on a second polynucleotide molecule and a cytosine on one polynucleotide molecule will base pair to guanine on a second polynucleotide molecule. Two polynucleotide molecules are complementary to each other when a first polynucleotide molecule comprising a first nucleotide sequence can base pair with a second polynucleotide molecule comprising a second nucleotide sequence. For instance, the two DNA molecules 5′-ATGC-3′ and 5′-GCAT-3′ are complementary, and the complement of the DNA molecule 5′-ATGC-3′ is 5′-GCAT-3′. A percentage of complementarity indicates the percentage of nucleotides in a polynucleotide molecule which can base pair with a second polynucleotide molecule (e.g., 5, 6, 7, 8, 9, 10 out of 10 being 50%, 60%, 70%, 80%, 90%, and 100% complementary, respectively). “Perfectly complementary” means that all the contiguous nucleotides of a polynucleotide molecule will base pair with the same number of contiguous nucleotides in a second polynucleotide molecule. “Substantially complementary” as used herein refers to a degree of complementarity that can be 70%, 75%, 80%, 85%, 90%, 95%, 97%, 98%, or 99% over all or a portion of two polynucleotide molecules. In some embodiments, the portion of complementarity can be a region of 10, 15, 20, 25, 30, 35, 40, 45, 50, or more nucleotides. “Substantial complementary” can also refer to a 100% complementarity over a portion or a region of two polynucleotide molecules. In some embodiments, the portion or the region of complementarity between the two polynucleotide molecules is at least 60%, 65%, 70%, 75%, 80%, 85%, 90%, 95%, 97%, 98%, or 99% of the length of at least one of the two polynucleotide molecules or a functional or defined portion thereof.

[0066] As used herein, “expression” refers to the process by which polynucleotides are transcribed into mRNA and/or the process by which polynucleotides, e.g., the transcribed mRNA, translated into peptides, polypeptides, or proteins. If the polynucleotide is derived from genomic DNA, expression can include splicing of the mRNA in a eukaryotic cell. In some embodiments, expression of a polynucleotide, e.g., a gene or a DNA encoding a protein, is determined by the amount of the protein encoded by the gene after transcription and translation of the gene. In some embodiments, expression of a polynucleotide, e.g., a gene or a DNA encoding a protein, is determined by the amount of a functional form of the protein encoded by the gene after transcription and translation of the gene. In some embodiments, expression of a gene is determined by the amount of the mRNA, or transcript, that is encoded by the gene after transcription the gene. In some embodiments, expression of a polynucleotide, e.g., an mRNA, is determined by the amount of the protein encoded by the mRNA after translation of the mRNA. In some embodiments, expression of a polynucleotide, e.g., a mRNA or coding RNA, is determined by the amount of a functional form of the protein encoded by the polypeptide after translation of the polynucleotide.

[0067] The terms “equivalent” or “biological equivalent” are used interchangeably when referring to a particular molecule, or biological or cellular material, and means a molecule having minimal homology to another molecule while still maintaining a desired structure or functionality.

[0068] The term “encode” as it is applied to polynucleotides refers to a polynucleotide which is said to “encode” another polynucleotide, a polypeptide, or an amino acid if, in its native state or when manipulated by methods well known to those skilled in the art, it can be used as polynucleotide synthesis template, e.g., transcribed into an RNA, reverse transcribed into a DNA or cDNA, and/or translated to produce an amino acid, or a polypeptide or fragment thereof. In some embodiments, a polynucleotide comprising three contiguous nucleotides form a codon that encodes a specific amino acid. In some embodiments, a polynucleotide comprises one or more codons that encode a polypeptide. In some embodiments, a polynucleotide comprising one or more codons comprises a mutation in a codon compared to a wild-type reference polynucleotide. In some embodiments, the mutation in the codon encodes an amino acid substitution in a polypeptide encoded by the polynucleotide as compared to a wild-type reference polypeptide.

[0069] The term “mutation” as used herein refers to a change and/or alteration in an amino acid sequence of a protein or a nucleic acid sequence of a polynucleotide. Such changes and/or alterations can comprise the substitution, insertion, deletion and/or truncation of one or more amino acids, in the case of an amino acid sequence, and/or nucleotides, in the case of nucleic acid sequence, compared to a reference amino acid or a reference nucleic acid sequence. In some embodiments, the reference sequence is a wild-type sequence. In some embodiments, a mutation in a nucleic acid sequence of a polynucleotide encodes a mutation in the amino acid sequence of a polypeptide. In some embodiments, the mutation in the amino acid sequence of the polypeptide or the mutation in the nucleic acid sequence of the polynucleotide is a mutation associated with a disease state.

[0070] The term “subject” and its grammatical equivalents as used herein can refer to a human or a non-human. A subject can be a mammal. A human subject can be male or female. A human subject can be of any age. A subject can be a human embryo. A human subject can be a newborn, an infant, a child, an adolescent, or an adult. A human subject can be in need of treatment for a genetic disease or disorder. In some embodiments, a subject is suffering from, susceptible to, or at a risk of developing FA-C.

[0071] The terms “treatment” or “treating” and their grammatical equivalents refer to the medical management of a subject with an intent to cure, ameliorate, or ameliorate a symptom of, a disease, condition, or disorder. Treatment can include active treatment, that is, treatment directed specifically toward the improvement of a disease, condition, or disorder. Treatment can include causal treatment, that is, treatment directed toward removal of the cause of the associated disease, condition, or disorder. In addition, this treatment can include palliative treatment, that is, treatment designed for the relief of symptoms rather than the curing of the disease, condition, or disorder. Treatment can include supportive treatment, that is, treatment employed to supplement another specific therapy directed toward the improvement of the disease, condition, or disorder. In some embodiments, a condition can be pathological. In some embodiments, a treatment may not completely cure or prevent a disease, condition, or disorder. In some embodiments, a treatment ameliorates, but does not completely cure or prevent a disease, condition, or disorder. In some embodiments, a subject can be treated for 12 hours, 24 hours, 2 days, 3 days, 4 days, 5 days, 6 days, 7 days, 2 weeks, 3 weeks, 4 weeks, 2 months, 3 months, 4 months, 5 months, 6 months, 1 year, 2 years, 3 years, 4 years, 5 years, 6 years, indefinitely, or life of the subject.

[0072] The term “ameliorate” and its grammatical equivalents means to decrease, suppress, attenuate, diminish, arrest, or stabilize the development or progression of a disease.

[0073] The terms “prevent” or “preventing” means delaying, forestalling, or avoiding the onset or development of a disease, condition, or disorder for a period of time. Prevent also means reducing risk of developing a disease, disorder, or condition. Prevention includes minimizing or partially or completely inhibiting the development of a disease, condition, or disorder. In some embodiments, a composition, e.g. a pharmaceutical composition, prevents a disorder by delaying the onset of the disorder for 12 hours, 24 hours, 2 days, 3 days, 4 days, 5 days, 6 days, 7 days, 2 weeks, 3 weeks, 4 weeks, 2 months, 3 months, 4 months, 5 months, 6 months, 1 year, 2 years, 3 years, 4 years, 5 years, 6 years, indefinitely, or life of a subject.

### Fanconi Anemia of Complementation Group C (FA-C)

[0074] Provided herein are methods and compositions for correcting one or more mutations in a target gene e.g., a FANCC gene. The disclosure also provides methods and compositions for treatment of a subtype of Fanconi anemia; Fanconi anemia group C or FA-C.

[0075] “Fanconi Anemia of complementation group C”, “Fanconi Anemia group C”, “FA-C”, or “Fanconi anemia type C” as used in herein refers to an autosomal recessive disease subtype of Fanconi anemia, that is associated with a mutation in a FANCC gene. In some embodiments, the mutation in the FANCC gene results in expression of a mutated FANCC protein. In some embodiments, the mutation in the FANCC gene results in expression of a non-functional FANCC protein. Accordingly, in some embodiments, FA-C refers to a disease subtype of FA that is associated with expression of a mutated FANCC protein.

[0076] As used herein, the term “FANCC gene”, “FANCC”, or “FA Complementation Group C gene” is one of a group of classical Fanconi anemia genes whose protein products form a FA core complex. The FANCC gene encodes a FANCC protein. In some embodiments, the FANCC gene is a human FANCC gene. In some embodiments, the FANCC gene (e.g., a human FANCC gene) is localized at positions 95099054 to 95317730 of chromosome 9. In some embodiments, the FANCC gene comprises 14 exons. In some embodiments, the FANCC gene codes an ORF of 1677 bp, the translation of which results in a FANCC protein of 558 aa, weighting about 63 kDa. Exemplary sequence of a wild type FANCC gene is set forth as SEQ ID NO: 3809.

[0077] In some embodiments, the FANCC gene comprises a mutation relative to a wild type FANCC gene (for example, a wild type FANCC gene set forth as SEQ ID NO: 3809). In some embodiments, the mutation occurs within an intron of the FANCC gene. In some embodiments, the mutation is within an intron, at a splice site, or adjacent to a splice site, of the FANCC gene, and affects the splicing of a transcript encoded by the FANCC gene.

[0078] In some embodiments, the mutation in a FANCC gene is located between positions 95,171, 933 and 95,172,133 of human chromosome 9 according to GRCh38. In some embodiments, the mutation comprises a transversion. In some embodiments, the mutation in a FANCC gene is located at position 95,172,033 of human chromosome 9 according to GRCh38. In some embodiments, the mutation is an A to T transversion at position 95,172,033 of human chromosome 9 according to GRCh38, referred to as the “IVS4+4A>T” mutation. In some embodiments, the mutation in a FANCC gene (e.g., a IVS4+4A>T) encodes a mutated FANCC protein that comprises a truncation after the 4th exon. The mutation, IVS4+4A>T, is also referred to as c456+4A>T or IVS4, A-T, +4, and is located at position 95,172,033 of chromosome 9 according to GRCh38.

[0079] In some embodiments, the mutation in a FANCC gene is located between positions 95, 248, 125 and 95, 248, 325 of human chromosome 9 according to GRCh38. In some embodiments, the FANCC gene comprises a mutation in an exon relative to a wild type FANCC gene (for example, a wild type FANCC gene set forth as SEQ ID NO 3809). In some embodiments, the mutation comprises a single G nucleotide deletion at position 95,248,225 of human chromosome 9 according to GRCh38, referred to as the “322delG” mutation. The mutation is also referred to as c.67del. In some embodiments, the mutation (e.g., c.67del or 322delG) results in a frameshift mutation in the protein sequence. In some embodiments, the mutation in a FANCC gene (e.g., c.67del or 322delG) results in a premature stop codon. In some embodiments, a target FANCC gene is a FANCC gene that is a target gene for prime editing using the compositions and methods disclosed herein.

[0080] The term “FANCC protein” or “FANCC” as used herein refers to a protein encoded by the FANCC gene. In some embodiments, FANCC is a human FANCC. Amino acid sequences of a wild type FANCC are known in the art and available publicly, for example, from the NCBI website. Non-limiting example includes NCBI accession number NP_000127, which is incorporated herein in its entirety. FANCC protein can be used interchangeably with Fanconi Anemia Complementation Group C, FACC, FAC, or Fanconi Anemia Group C Protein. FANCC is one of the group of proteins that form a FA core complex. The FANCC protein complexes with at least three other proteins FANCA, FANCF, and FANCG to form the FA core complex. The FA core complex including the FANCC protein, functions in DNA damage repair in part by post-translation modification of a FANCD2 protein.

[0081] FA-C patients with the c.456+4A->T mutation (also referred to as the IVS4+4A->T mutation) demonstrate higher incidence and more rapid emergence of BMF compared to other groups at a median age of 2.7 years. Patients with exon 1 c.67del (322delG) have more typical disease progression with hematologic symptoms at a median age of 7 years.

[0082] BMF of FA-C patients is attributable to impaired CD34+ hematopoietic stem cell pool. FA-C patients develop progressive bone marrow failure during childhood and require an allogeneic related or unrelated HSCT. Clinical presentation of FA-C includes congenital anomalies, pan cytopenia, BMF, and a predisposition to myeloid and epithelial cancers. Cytopenias and BMF affect the majority of FA-C patients within the first decade of life. The proposed mechanism for cytopenias and BMF is intolerance to oxidative stress in response to accumulated DNA damage in the CD34+ HSPC pool.

[0083] Rapid diagnostic testing is achieved by exposure of patient peripheral blood (PB) cells to DNA crosslinking agents such as diepoxybutane (DEB) or mitomycin C (MMC), which results in high frequency characteristic chromosomal breaks. Patients would need genotyping test after this diagnosis to identify predominant FANCC mutations. Of note, FA-C patients with transversion mutation c.456+4A->T (IVS4+4A>T) will present very early in life (median 2.7 years of age). Corrected cells should exhibit a survival and proliferative advantage over endogenous FA cells. Biomarkers for correction include rescue from sensitivity to MMC and DEB in bone marrow CD34+ HSPCs and peripheral blood lymphocytes. Provided herein are compositions and methods to correct a mutation in a FANCC gene (e.g., c.456+4A->T (IVS4+4A>T), or c.67del (322delG)) by prime editing. Provided herein are compositions and methods to install a nucleotide change in a FANCC gene.

### Prime Editing

[0084] The term “prime editing” refers to programmable editing of a target DNA using a prime editor complexed with a PEgRNA to incorporate an intended nucleotide edit (also referred to herein as a nucleotide change) into the target DNA through target-primed DNA synthesis. A target gene of prime editing can comprise a double stranded DNA molecule having two complementary strands: a first strand that can be referred to as a “target strand” or a “non-edit strand”, and a second strand that can be referred to as a “non-target strand,” or an “edit strand.” In some embodiments, in a prime editing guide RNA (PEgRNA), a spacer sequence is complementary or substantially complementary to a specific sequence on the target strand, which can be referred to as a “search target sequence”. In some embodiments, the spacer sequence anneals with the target strand at the search target sequence. The target strand can also be referred to as the “non-Protospacer Adjacent Motif (non-PAM strand).” In some embodiments, the non-target strand may also be referred to as the “PAM strand”. In some embodiments, the PAM strand comprises a protospacer sequence and optionally a protospacer adjacent motif (PAM) sequence. In prime editing using a Cas-protein-based prime editor, a PAM sequence refers to a short DNA sequence immediately adjacent to the protospacer sequence on the PAM strand of the target gene. A PAM sequence may be specifically recognized by a programmable DNA binding protein, e.g., a Cas nickase or a Cas nuclease. In some embodiments, a specific PAM is characteristic of a specific programmable DNA binding protein, e.g., a Cas nickase or a Cas nuclease. A protospacer sequence refers to a specific sequence in the PAM strand of the target gene that is complementary to the search target sequence. In a PEgRNA, a spacer sequence can have a substantially identical sequence as the protospacer sequence on the edit strand of a target gene (e.g. FANCC gene), except that the spacer sequence can comprise Uracil (U) and the protospacer sequence may comprise Thymine (T).

[0085] In some embodiments, the double stranded target DNA comprises a nick site on the PAM strand (or non-target strand). As used herein, a “nick site” refers to a specific position in between two nucleotides or two base pairs of the double stranded target DNA. In some embodiments, the position of a nick site is determined relative to the position of a specific PAM sequence. In some embodiments, the nick site is the particular position where a nick will occur when the double stranded target DNA is contacted with a nickase, for example, a Cas nickase, that recognizes a specific PAM sequence. In some embodiments, the nick site is upstream of a specific PAM sequence on the PAM strand of the double stranded target DNA. In some embodiments, the nick site is downstream of a specific PAM sequence on the PAM strand of the double stranded target DNA. In some embodiments, the nick site is upstream of a PAM sequence recognized by a Cas9 nickase, wherein the Cas9 nickase comprises a nuclease active RuvC domain and a nuclease inactive HNH domain. In some embodiments, the nick site is 3 nucleotides upstream of the PAM sequence, and the PAM sequence is recognized by a Streptococcus pyogenes Cas9 nickase, a P. lavamentivorans Cas9 nickase, a C. diphtheriae Cas9 nickase, a N. cinerea Cas9, a S. aureus Cas9, or a N. lari Cas9 nickase. In some embodiments, the nick site is 3 base pairs upstream of the PAM sequence, and the PAM sequence is recognized by a Cas9 nickase, wherein the Cas9 nickase that comprises a nuclease active RuvC domain and a nuclease inactive HNH domain. In some embodiments, the nick site is 2 nucleotides upstream of the PAM sequence, and the PAM sequence is recognized by a S. thermophilus Cas9 nickase that comprises a nuclease active RuvC domain and a nuclease inactive HNH domain.

[0086] A “primer binding site” (also referred to as PBS or primer binding site sequence) is a single-stranded portion of the PEgRNA that comprises a region of complementarity to the PAM strand (i.e. the non-target strand or the edit strand). The PBS is complementary or substantially complementary to a sequence on the PAM strand of the double stranded target DNA that is immediately upstream of the nick site. In some embodiments, in the process of prime editing, the PEgRNA complexes with and directs a prime editor to bind the search target sequence on the target strand of the double stranded target DNA, and generates a nick at the nick site on the non-target strand of the double stranded target DNA. In some embodiments, the PBS is complementary to or substantially complementary to, and can anneal to, a free 3′ end on the non-target strand of the double stranded target DNA at the nick site. In some embodiments, the PBS annealed to the free 3′ end on the non-target strand can initiate target-primed DNA synthesis.

[0087] An “editing template” of a PEgRNA is a single-stranded portion of the PEgRNA that is 5′ of the PBS and which encodes a single strand of DNA. The editing template may comprise a region of complementarity to the PAM strand (i.e. the non-target strand or the edit strand), and comprises one or more intended nucleotide edits compared to the endogenous sequence of the double stranded target DNA. In some embodiments, the editing template and the PBS are immediately adjacent to each other. Accordingly, in some embodiments, a PEgRNA in prime editing comprises a single-stranded portion that comprises the PBS and the editing template immediately adjacent to each other. In some embodiments, the single stranded portion of the PEgRNA comprising both the PBS and the editing template is complementary or substantially complementary to an endogenous sequence on the PAM strand (i.e., the non-target strand or the edit strand) of the double stranded target DNA except for one or more non-complementary nucleotides at the intended nucleotide edit position(s). As used herein, regardless of relative 5′-3′ positioning in other context, the relative positions as between the PBS and the editing template, and the relative positions as among elements of a PEgRNA, are determined by the 5′ to 3′ order of the PEgRNA as a single molecule regardless of the position of sequences in the double stranded target DNA that may have complementarity or identity to elements of the PEgRNA. In some embodiments, the editing template is complementary or substantially complementary to a sequence on the PAM strand that is immediately downstream of the nick site, except for one or more non-complementary nucleotides at the intended nucleotide edit positions. The endogenous, e.g., genomic, sequence that is complementary or substantially complementary to the editing template, except for the one or more non-complementary nucleotides at the position corresponding to the intended nucleotide edit, may be referred to as an “editing target sequence”. In some embodiments, the editing template has identity or substantial identity to a sequence on the target strand that is complementary to, or having the same position in the genome as, the editing target sequence, except for one or more insertions, deletions, or substitutions at the intended nucleotide edit positions. In some embodiments, the editing template encodes a single stranded DNA, wherein the single stranded DNA has identity or substantial identity to the editing target sequence except for one or more insertions, deletions, or substitutions at the positions of the one or more intended nucleotide edits. In some embodiments, the editing template may encode the wild-type or non-disease associated gene sequence (or its complement if the edit strand is the antisense strand of a gene). In some embodiments, the editing template may encode the wild-type or non-disease associated protein but contain one or more synonymous mutations relative to the wild-type or non-disease associated protein coding region. Such synonymous mutations may include, for example, mutations that decrease the ability of a PEgRNA to rebind to the same target sequence once the desired edit is installed in the genome (e.g., synonymous mutations that silence the endogenous PAM sequence or that edit the endogenous protospacer).

[0088] In some embodiments, a PEgRNA complexes with and directs a prime editor to bind to the search target sequence of the target gene. In some embodiments, the bound prime editor generates a nick on the edit strand (PAM strand) of the target gene at the nick site. In some embodiments, a primer binding site (PBS) of the PEgRNA anneals with a free 3′ end formed at the nick site, and the prime editor initiates DNA synthesis from the nick site, using the free 3′ end as a primer. Subsequently, a single-stranded DNA encoded by the editing template of the PEgRNA is synthesized. In some embodiments, the newly synthesized single-stranded DNA comprises one or more intended nucleotide edits compared to the endogenous target gene sequence. Accordingly, in some embodiments, the editing template of a PEgRNA is complementary to a sequence in the edit strand except for one or more mismatches at the intended nucleotide edit positions in the editing template. The endogenous, e.g., genomic, sequence that is partially complementary to the editing template can be referred to as an “editing target sequence”. Accordingly, in some embodiments, the newly synthesized single stranded DNA has identity or substantial identity to a sequence in the editing target sequence, except for one or more insertions, deletions, or substitutions at the intended nucleotide edit positions. In some embodiments, the editing template comprises at least 4 contiguous nucleotides of complementarity with the edit strand wherein the at least 4 nucleotides contiguous are located upstream of the 5′ most edit in the editing template.

[0089] In some embodiments, the newly synthesized single-stranded DNA equilibrates with the editing target on the edit strand of the target gene for pairing with the target strand of the target gene. In some embodiments, the editing target sequence of the target gene is excised by a flap endonuclease (FEN), for example, FEN1. In some embodiments, the FEN is an endogenous FEN, for example, in a cell comprising the target gene. In some embodiments, the FEN is provided as part of the prime editor, either linked to other components of the prime editor or provided in trans. In some embodiments, the newly synthesized single stranded DNA, which comprises the intended nucleotide edit, replaces the endogenous single stranded editing target sequence on the edit strand of the target gene. In some embodiments, the newly synthesized single stranded DNA and the endogenous DNA on the target strand form a heteroduplex DNA structure at the region corresponding to the editing target sequence of the target gene. In some embodiments, the newly synthesized single-stranded DNA comprising the nucleotide edit is paired in the heteroduplex with the target strand of the target DNA that does not comprise the nucleotide edit, thereby creating a mismatch between the two otherwise complementary strands. In some embodiments, the mismatch is recognized by DNA repair machinery, e.g., an endogenous DNA repair machinery. In some embodiments, through DNA repair, the intended nucleotide edit is incorporated into the target gene.

### Prime Editor

[0090] The term “prime editor (PE)” refers to the polypeptide or polypeptide components involved in prime editing. In various embodiments, a prime editor includes a polypeptide domain having DNA binding activity and a polypeptide domain having DNA polymerase activity. In some embodiments, the prime editor further comprises a polypeptide domain having nuclease activity. In some embodiments, the polypeptide domain having DNA binding activity comprises a nuclease domain or nuclease activity. In some embodiments, the polypeptide domain having nuclease activity comprises a nickase, or a fully active nuclease. As used herein, the term “nickase” refers to a nuclease capable of cleaving only one strand of a double-stranded DNA target. In some embodiments, the prime editor comprises a polypeptide domain that is an inactive nuclease. In some embodiments, the polypeptide domain having programmable DNA binding activity comprises a nucleic acid guided DNA binding domain, for example, a CRISPR-Cas protein, for example, a Cas9 nickase, a Cpf1 nickase, or another CRISPR-Cas nuclease. In some embodiments, the polypeptide domain having DNA polymerase activity comprises a template-dependent DNA polymerase, for example, a DNA-dependent DNA polymerase or an RNA-dependent DNA polymerase. In some embodiments, the DNA polymerase is a reverse transcriptase. In some embodiments, the prime editor comprises additional polypeptides involved in prime editing, for example, a polypeptide domain having a 5′ endonuclease activity, e.g., a 5′ endogenous DNA flap endonucleases (e.g., FEN1), for helping to drive the prime editing process towards the edited product formation. In some embodiments, the prime editor further comprises an RNA-protein recruitment polypeptide, for example, a MS2 coat protein.

[0091] A prime editor can be engineered. In some embodiments, the polypeptide components of a prime editor do not naturally occur in the same organism or cellular environment. In some embodiments, the polypeptide components of a prime editor may be of different origins or from different organisms. In some embodiments, a prime editor comprises a DNA binding domain and a DNA polymerase domain that are derived from different species. In some embodiments, a prime editor comprises a Cas polypeptide (DNA binding domain) and a reverse transcriptase polypeptide (DNA polymerase) that are derived from different species. For example, a prime editor can comprise a S. pyogenes Cas9 polypeptide and a Moloney murine leukemia virus (M-MLV) reverse transcriptase polypeptide.

[0092] In some embodiments, polypeptide domains of a prime editor can be fused or linked by a peptide linker to form a fusion protein. In other embodiments, a prime editor comprises one or more polypeptide domains provided in trans as separate proteins, which are capable of being associated to each other through non-peptide linkages or through aptamers or recruitment sequences. For example, a prime editor can comprise a DNA binding domain and a reverse transcriptase domain associated with each other by an RNA-protein recruitment aptamer, e.g. a MS2 aptamer, which can be linked to a PEgRNA. Prime editor polypeptide components can be encoded by one or more polynucleotides in whole or in part. In some embodiments, a single polynucleotide, construct, or vector encodes the prime editor fusion protein. In some embodiments, multiple polynucleotides, constructs, or vectors each encode a polypeptide domain or portion of a domain of a prime editor, or a portion of a prime editor fusion protein. For example, a prime editor fusion protein can comprise an N-terminal portion fused to an intein-N and a C-terminal portion fused to an intein-C, each of which is individually encoded by an AAV vector.

### Prime Editor Nucleotide Polymerase Domain

[0093] In some embodiments, a prime editor comprises a nucleotide polymerase domain, e.g. a DNA polymerase domain. The DNA polymerase domain can be a wild-type DNA polymerase domain, a full-length DNA polymerase protein domain, or can be a functional mutant, a functional variant, or a functional fragment thereof. In some embodiments, the polymerase domain is a template dependent polymerase domain. For example, the DNA polymerase can rely on a template polynucleotide strand, e.g., the editing template sequence, for new strand DNA synthesis. In some embodiments, the prime editor comprises a DNA-dependent DNA polymerase. For example, a prime editor having a DNA-dependent DNA polymerase can synthesize a new single stranded DNA using a PEgRNA editing template that comprises a DNA sequence as a template. In such cases, the PEgRNA is a chimeric or hybrid PEgRNA, and comprising an extension arm comprising a DNA strand. The chimeric or hybrid PEgRNA can comprise an RNA portion (including the spacer and the gRNA core) and a DNA portion (the extension arm comprising the editing template that includes a strand of DNA).

[0094] In some embodiments, the DNA polymerases can be wild type polymerases from eukaryotic, prokaryotic, archaeal, or viral organisms, and/or the polymerases may be modified by genetic engineering, mutagenesis, or directed evolution-based processes. The polymerases can be a T7 DNA polymerase, T5 DNA polymerase, T4 DNA polymerase, Klenow fragment DNA polymerase, DNA polymerase III and the like. The polymerases can be thermostable, and can include Taq, Tne, Tma, Pfu, Tfl, Tth, Stoffel fragment, VENT® and DEEPVENT® DNA polymerases, KOD, Tgo, JDF3, and mutants, variants and derivatives thereof.

[0095] In some embodiments, the DNA polymerase is a bacteriophage polymerase, for example, a T4, T7, or phi29 DNA polymerase. In some embodiments, the DNA polymerase is an archaeal polymerase, for example, pol I type archaeal polymerase or a pol II type archaeal polymerase. In some embodiments, the DNA polymerase comprises a thermostable archaeal DNA polymerase. In some embodiments, the DNA polymerase comprises a eubacterial DNA polymerase, for example, Pol I, Pol II, or Pol III polymerase. In some embodiments, the DNA polymerase is a Pol I family DNA polymerase. In some embodiments, the DNA polymerase is a E. coli Pol I DNA polymerase. In some embodiments, the DNA polymerase is a Pol II family DNA polymerase. In some embodiments, the DNA polymerase is a Pyrococcus furiosus (Pfu) Pol II DNA polymerase. In some embodiments, the DNA Polymerase is a Pol IV family DNA polymerase. In some embodiments, the DNA polymerase is a E. coli Pol IV DNA polymerase.

[0096] In some embodiments, the DNA polymerase comprises a eukaryotic DNA polymerase. In some embodiments, the DNA polymerase is a Pol-beta DNA polymerase, a Pol-lambda DNA polymerase, a Pol-sigma DNA polymerase, or a Pol-mu DNA polymerase. In some embodiments, the DNA polymerase is a Pol-alpha DNA polymerase. In some embodiments, the DNA polymerase is a POLA1 DNA polymerase. In some embodiments, the DNA polymerase is a POLA2 DNA polymerase. In some embodiments, the DNA polymerase is a Pol-delta DNA polymerase. In some embodiments, the DNA polymerase is a POLD1 DNA polymerase. In some embodiments, the DNA polymerase is a POLD2 DNA polymerase. In some embodiments, the DNA polymerase is a human POLD1 DNA polymerase. In some embodiments, the DNA polymerase is a human POLD2 DNA polymerase. In some embodiments, the DNA polymerase is a POLD3 DNA polymerase. In some embodiments, the DNA polymerase is a POLD4 DNA polymerase. In some embodiments, the DNA polymerase is a Pol-epsilon DNA polymerase. In some embodiments, the DNA polymerase is a POLE1 DNA polymerase. In some embodiments, the DNA polymerase is a POLE2 DNA polymerase. In some embodiments, the DNA polymerase is a POLE3 DNA polymerase. In some embodiments, the DNA polymerase is a Pol-eta (POLH) DNA polymerase. In some embodiments, the DNA polymerase is a Pol-iota (POLI) DNA polymerase. In some embodiments, the DNA polymerase is a Pol-kappa (POLK) DNA polymerase. In some embodiments, the DNA polymerase is a RevI DNA polymerase. In some embodiments, the DNA polymerase is a human RevI DNA polymerase. In some embodiments, the DNA polymerase is a viral DNA-dependent DNA polymerase. In some embodiments, the DNA polymerase is a B family DNA polymerases. In some embodiments, the DNA polymerase is a herpes simplex virus (HSV) UL30 DNA polymerase. In some embodiments, the DNA polymerase is a cytomegalovirus (CMV) UL54 DNA polymerase.

[0097] In some embodiments, the DNA polymerase is an archaeal polymerase. In some embodiments, the DNA polymerase is a Family B/pol I type DNA polymerase. For example, in some embodiments, the DNA polymerase is a homolog of Pfu from Pyrococcus furiosus. In some embodiments, the DNA polymerase is a pol II type DNA polymerase. For example, in some embodiments, the DNA polymerase is a homolog of P. furiosus DP1/DP2 2-subunit polymerase. In some embodiments, the DNA polymerase lacks 5′ to 3′ nuclease activity. Suitable DNA polymerases (pol I or pol II) can be derived from archaea with optimal growth temperatures that are similar to the desired assay temperatures.

[0098] In some embodiments, the DNA polymerase comprises a thermostable archaeal DNA polymerase. In some embodiments, the thermostable DNA polymerase is isolated or derived from Pyrococcus species (furiosus, species GB-D, woesii, abysii, horikoshii), Thermococcus species (kodakaraensis KOD1, litoralis, species 9 degrees North-7, species JDF-3, gorgonarius), Pyrodictium occultum, and Archaeoglobus fulgidus.

[0099] Polymerases may also be from eubacterial species. In some embodiments, the DNA polymerase is a Pol I family DNA polymerase. In some embodiments, the DNA polymerase is an E. coli Pol I DNA polymerase. In some embodiments, the DNA polymerase is a Pol II family DNA polymerase. In some embodiments, the DNA polymerase is a Pyrococcus furiosus (Pfu) Pol II DNA polymerase. In some embodiments, the DNA Polymerase is a Pol III family DNA polymerase. In some embodiments, the DNA Polymerase is a Pol IV family DNA polymerase. In some embodiments, the DNA polymerase is an E. coli Pol IV DNA polymerase. In some embodiments, the Pol I DNA polymerase is a DNA polymerase functional variant that lacks or has reduced 5′ to 3′ exonuclease activity.

[0100] Suitable thermostable pol I DNA polymerases can be isolated from a variety of thermophilic eubacteria, including Thermus species and Thermotoga maritima such as Thermus aquaticus (Taq), Thermus thermophilus (Tth) and Thermotoga maritima (Tma UlTma).

[0101] In some embodiments, a prime editor comprises an RNA-dependent DNA polymerase domain, for example, a reverse transcriptase (RT). A RT or an RT domain can be a wild type RT domain, a full-length RT domain, or may be a functional mutant, a functional variant, or a functional fragment thereof. An RT or an RT domain of a prime editor may comprise a wild-type RT, or may be engineered or evolved to contain specific amino acid substitutions, truncations, or variants. An engineered RT may comprise sequences or amino acid changes different from a naturally occurring RT. In some embodiments, the engineered RT may have improved reverse transcription activity over a naturally occurring RT or RT domain. In some embodiments, the engineered RT may have improved features over a naturally occurring RT, for example, improved thermostability, reverse transcription efficiency, or target fidelity. In some embodiments, a prime editor comprising the engineered RT has improved prime editing efficiency over a prime editor having a reference naturally occurring RT.

[0102] In some embodiments, a prime editor comprises a virus RT, for example, a retrovirus RT. Non-limiting examples of virus RT include Moloney murine leukemia virus (M-MLV RT, MMLVRT or M-MLVRT); human T-cell leukemia virus type 1 (HTLV-1) RT; bovine leukemia virus (BLV) RT; Rous Sarcoma Virus (RSV) RT; human immunodeficiency virus (HIV) RT, M-MFV RT, Avian Sarcoma-Leukosis Virus (ASLV) RT, Rous Sarcoma Virus (RSV) RT, Avian Myeloblastosis Virus (AMV) RT, Avian Erythroblastosis Virus (AEV) Helper Virus MCAV RT, Avian Myelocytomatosis Virus MC29 Helper Virus MCAV RT, Avian Reticuloendotheliosis Virus (REV-T) Helper Virus REV-A RT, Avian Sarcoma Virus UR2 Helper Virus (UR2AV) RT, Avian Sarcoma Virus Y73 Helper Virus YAV RT, Rous Associated Virus (RAV) RT, and Myeloblastosis Associated Virus (MAV) RT, all of which may be suitably used in the methods and composition described herein.

[0103] In some embodiments, the prime editor comprises a wild type M-MLV RT, a functional mutant, a functional variant, or a functional fragment thereof.

[0104] In some embodiments, the prime editor comprises a reference M-MLV RT, a functional mutant, a functional variant, or a functional fragment thereof. In some embodiments, the RT domain or a RT is a M-MLV RT (e.g., wild-type M-MLV RT, a functional mutant, a functional variant, or a functional fragment thereof). In some embodiments, the RT domain or a RT is a M-MLV RT (e.g., a reference M-MLV RT, a functional mutant, a functional variant, or a functional fragment thereof). In some embodiments, a M-MLV RT comprises an amino acid sequence as set forth in any one of SEQ ID NOs: 3690-3692. In some embodiments, the prime editor comprises a wild type M-MLV RT. An exemplary amino acid sequence of a wild type M-MLV RT is provided in SEQ ID NO: 3691.

(SEQ ID NO: 3691)
TLNIEDEHRLHETSKEPDVSLGSTWLSDFPQAWAETGGMGLAVRQAPLI
IPLKATSTPVSIKQYPMSQEARLGIKPHIQRLLDQGILVPCQSPWNTPL
LPVKKPGTNDYRPVQDLREVNKRVEDIHPTVPNPYNLLSGLPPSHQWYT
VLDLKDAFFCLRLHPTSQPLFAFEWRDPEMGISGQLTWTRLPQGFKNSP
TLFDEALHRDLADFRIQHPDLILLQYVDDLLLAATSELDCQQGTRALLQ
TLGNLGYRASAKKAQICQKQVKYLGYLLKEGQRWLTEARKETVMGQPTP
KTPRQLREFLGTAGFCRLWIPGFAEMAAPLYPLTKTGTLFNWGPDQQKA
YQEIKQALLTAPALGLPDLTKPFELFVDEKQGYAKGVLTQKLGPWRRPV
AYLSKKLDPVAAGWPPCLRMVAAIAVLTKDAGKLTMGQPLVILAPHAVE
ALVKQPPDRWLSNARMTHYQALLLDTDRVQFGPVVALNPATLLPLPEEG
LQHNCLDILAEAHGTRPDLTDQPLPDADHTWYTDGSSLLQEGQRKAGAA
VTTETEVIWAKALPAGTSAQRAELIALTQALKMAEGKKLNVYTDSRYAF
ATAHIHGEIYRRRGLLTSEGKEIKNKDEILALLKALFLPKRLSIIHCPG
HQKGHSAEARGNRMADQAARKAAITETPDTSTLLIENSSP.

[0105] In some embodiments, the prime editor comprises a reference M-MLV RT. An exemplary amino acid sequence of a reference M-MLV RT is provided in SEQ ID NO: 3690.

(SEQ ID NO: 3690)
TLNIEDEYRLHETSKEPDVSLGSTWLSDFPQAWAETGGMGLAVRQAPLI
IPLKATSTPVSIKQYPMSQEARLGIKPHIQRLLDQGILVPCQSPWNTPL
LPVKKPGTNDYRPVQDLREVNKRVEDIHPTVPNPYNLLSGLPPSHQWYT
VLDLKDAFFCLRLHPTSQPLFAFEWRDPEMGISGQLTWTRLPQGFKNSP
TLFDEALHRDLADFRIQHPDLILLQYVDDLLLAATSELDCQQGTRALLQ
TLGNLGYRASAKKAQICQKQVKYLGYLLKEGQRWLTEARKETVMGQPTP
KTPRQLREFLGTAGFCRLWIPGFAEMAAPLYPLTKTGTLFNWGPDQQKA
YQEIKQALLTAPALGLPDLTKPFELFVDEKQGYAKGVLTQKLGPWRRPV
AYLSKKLDPVAAGWPPCLRMVAAIAVLTKDAGKLTMGQPLVILAPHAVE
ALVKQPPDRWLSNARMTHYQALLLDTDRVQFGPVVALNPATLLPLPEEG
LQHNCLDILAEAHGTRPDLTDQPLPDADHTWYTDGSSLLQEGQRKAGAA
VTTETEVIWAKALPAGTSAQRAELIALTQALKMAEGKKLNVYTDSRYAF
ATAHIHGEIYRRRGLLTSEGKEIKNKDEILALLKALFLPKRLSIIHCPG
HQKGHSAEARGNRMADQAARKAAITETPDTSTLLIENSSP

[0106] In some embodiments, the prime editor comprises a M-MLV RT comprising one or more of amino acid substitutions P51X, S67X, E69X, L139X, T197X, D200X, H204X, F209X, E302X, T306X, F309X, W313X, T330X, L345X, L435X, N454X, D524X, E562X, D583X, H594X, L603X, E607X, or D653X as compared to the reference M-MLV RT as set forth in SEQ ID NO: 3690, where X is any amino acid other than the original amino acid in the reference M-MLV RT. In some embodiments, the prime editor comprises a M-MMLV RT comprising one or more of amino acid substitutions P51L, S67K, E69K, L139P, T197A, D200N, H204R, F209N, E302K, E302R, T306K, F309N, W313F, T330P, L345G, L435G, N454K, D524G, E562Q, D583N, H594Q, L603W, E607K, and D653N as compared to the reference M-MLV RT as set forth in SEQ ID NO: 3690. In some embodiments, the prime editor comprises a M-MLV RT comprising one or more amino acid substitutions D200N, T330P, L603W, T306K, and W313F as compared to the reference M-MLV RT as set forth in SEQ ID NO: 3690. In some embodiments, the prime editor comprises a M-MLV RT comprising amino acid substitutions D200N, T330P, L603W, T306K, and W313F as compared to a reference M-MLV RT as set forth in SEQ ID NO: 3690. In some embodiments, the prime editor comprises a M-MLV RT comprising one or more of amino acid substitutions D200N, T330P, L603W, T306K, and W313F as compared to a wild type M-MMLV RT as set forth in SEQ ID NO: 3691. In some embodiments, a prime editor may comprise amino acid substitutions D200N, T330P, L603W, T306K, and W313F as compared to a reference M-MLV RT as set forth in SEQ ID NO: 3690. In some embodiments, the prime editor comprises a M-MLV RT that comprises an amino acid sequence that is at least 70%, at least 75%, at least 80%, at least 85%, at least 90%, at least 95%, at least 96%, at least 97%, at least 98%, at least 99%, at least 99.5%, or at least 99.9% identical to an amino acid sequence set forth in any one of SEQ ID NOs: 3690, 3691, or 3692. In some embodiments, the prime editor comprises a M-MLV RT that comprises an amino acid sequence that is selected from the group consisting of SEQ ID NOs: 3690, 3691, and 3692, or a variant or fragment thereof.

[0107] In some embodiments, the prime editor comprises a M-MLV RT that comprises an amino acid sequence that is at least 70%, at least 75%, at least 80%, at least 85%, at least 90%, at least 95%, at least 96%, at least 97%, at least 98%, at least 99%, at least 99.5%, or at least 99.9% identical to an amino acid sequence set forth in SEQ ID NO: 3692. In some embodiments, the prime editor comprises a M-MLV RT that comprises an amino acid sequence set forth in SEQ ID NO: 3692.

(SEQ ID NO: 3692)
TLNIEDEYRLHETSKEPDVSLGSTWLSDFPQAWAETGGMGLAVRQAPLI
IPLKATSTPVSIKQYPMSQEARLGIKPHIQRLLDQGILVPCQSPWNTPL
LPVKKPGTNDYRPVQDLREVNKRVEDIHPTVPNPYNLLSGLPPSHQWYT
VLDLKDAFFCLRLHPTSQPLFAFEWRDPEMGISGQLTWTRLPQGFKNSP
TLFNEALHRDLADFRIQHPDLILLQYVDDLLLAATSELDCQQGTRALLQ
TLGNLGYRASAKKAQICQKQVKYLGYLLKEGQRWLTEARKETVMGQPTP
KTPRQLREFLGKAGFCRLFIPGFAEMAAPLYPLTKPGTLFNWGPDQQKA
YQEIKQALLTAPALGLPDLTKPFELFVDEKQGYAKGVLTQKLGPWRRPV
AYLSKKLDPVAAGWPPCLRMVAAIAVLTKDAGKLTMGQPLVILAPHAVE
ALVKQPPDRWLSNARMTHYQALLLDTDRVQFGPVVALNPATLLPLPEEG
LQHNCLDILAEAHGTRPDLTDQPLPDADHTWYTDGSSLLQEGQRKAGAA
VTTETEVIWAKALPAGTSAQRAELIALTQALKMAEGKKLNVYTDSRYAF
ATAHIHGEIYRRRGWLTSEGKEIKNKDEILALLKALFLPKRLSIIHCPG
HQKGHSAEARGNRMADQAARKAAITETPDTSTLLIENSSP.

[0108] In some embodiments, an RT variant may be a functional fragment of a reference RT that has 1, 2, 3, 4, 5, 6, 7, 8, 9, 10, 11, 12, 13, 14, 15, 16, 17, 18, 19, 20, 21, 22, 21, 24, 25, 26, 27, 28, 29, 30, 31, 32, 33, 34, 35, 36, 37, 38, 39, 40, 41, 42, 43, 44, 45, 46, 47, 48, 49, 50, or up to 100, or up to 200, or up to 300, or up to 400, or up to 500 or more amino acid changes compared to a wild type RT, e.g SEQ ID NO: 3691. In some embodiments, the RT variant comprises a fragment of a wild type RT, e.g., SEQ ID NO: 3691, such that the fragment is about 70% identical, about 80% identical, about 90% identical, about 95% identical, about 96% identical, about 97% identical, about 98% identical, about 99% identical, about 99.5% identical, or about 99.9% identical to the corresponding fragment of the wild type RT, e.g., SEQ ID NO: 3691. In some embodiments, the fragment is 30%, 35%, 40%, 45%, 50%, 55%, 60%, 65%, 70%, 75%, 80%, 85%, 90%, 95% identical, 96%, 97%, 98%, 99%, or 99.5% of the amino acid length of a corresponding wild type RT (M-MLV reverse transcriptase) (e.g., SEQ ID NO: 3691).

[0109] In some embodiments, an RT variant may be a functional fragment of a reference RT that has 1, 2, 3, 4, 5, 6, 7, 8, 9, 10, 11, 12, 13, 14, 15, 16, 17, 18, 19, 20, 21, 22, 21, 24, 25, 26, 27, 28, 29, 30, 31, 32, 33, 34, 35, 36, 37, 38, 39, 40, 41, 42, 43, 44, 45, 46, 47, 48, 49, 50, or up to 100, or up to 200, or up to 300, or up to 400, or up to 500 or more amino acid changes compared to a reference RT, e.g., SEQ ID NO: 3690. In some embodiments, the RT variant comprises a fragment of a reference RT, such that the fragment is about 70% identical, about 80% identical, about 90% identical, about 95% identical, about 96% identical, about 97% identical, about 98% identical, about 99% identical, about 99.5% identical, or about 99.9% identical to the corresponding fragment of a reference RT, e.g., SEQ ID NO: 3690. In some embodiments, the fragment is 30%, 35%, 40%, 45%, 50%, 55%, 60%, 65%, 70%, 75%, 80%, 85%, 90%, 95% identical, 96%, 97%, 98%, 99%, or 99.5% of the amino acid length of a reference RT, e.g., a M-MLV RT, e.g., SEQ ID NO: 3690. In some embodiments, the RT functional fragment is at least 100 amino acids in length. In some embodiments, the fragment is at least 100, 150, 200, 250, 300, 350, 400, 450, 500, 550, or up to 600 or more amino acids in length.

[0110] In still other embodiments, the functional RT variant is truncated at the N-terminus or the C-terminus, or both, by a certain number of amino acids which results in a truncated variant which still retains sufficient DNA polymerase function. In some embodiments, the functional RT variant, e.g., a functional MMLV RT variant, is truncated at the C-terminus to abolish or reduce RNAase H activity and still retain DNA polymerase activity.

[0111] In some embodiments, a prime editing composition or a prime editing system disclosed herein comprises a polynucleotide (e.g., a DNA, a RNA, e.g., a mRNA) that encodes a M-MLV RT. In some embodiments, the polynucleotide encodes a M-MLV RT that comprises an amino acid sequence that is at least 70%, at least 75%, at least 80%, at least 85%, at least 90%, at least 95%, at least 96%, at least 97%, at least 98%, at least 99%, at least 99.5%, or at least 99.9% identical to an amino acid sequence set forth in any one of the SEQ ID NOs: 3690, 3691, or 3692. In some embodiments, the polynucleotide encodes a M-MLV RT that comprises an amino acid sequence that is selected from the group consisting of SEQ ID NOs: 3690, 3691, and 3692. In some embodiments, the polynucleotide encodes a M-MLV RT that comprises an amino acid sequence that is set forth in SEQ ID NO: 3692.

[0112] In some embodiments, a prime editor comprises a eukaryotic RT, for example, a yeast, drosophila, rodent, or primate RT. In some embodiments, the prime editor comprises a Group II intron RT, for example, a. Geobacillus stearothermophilus Group II Intron (GsI-IIC) RT or a Eubacterium rectale group II intron (Eu.re.I2) RT. In some embodiments, the prime editor comprises a retron RT. In some embodiments, a prime editor comprises a eukaryotic RT, for example, a yeast, drosophila, rodent, or primate RT. In some embodiments, the prime editor comprises a Group II intron RT, for example, a. Geobacillus stearothermophilus Group II Intron (GsI-IIC) RT or a Eubacterium rectale group II intron (Eu.re.I2) RT. In some embodiments, the prime editor comprises a retron RT.

### Programmable DNA Binding Domain

[0113] In some embodiments, the DNA-binding domain of a prime editor is a programmable DNA binding domain. In some embodiments, a prime editor comprises a DNA binding domain that comprises an amino acid sequence that is at least 50%, at least 60%, at least 70%, at least 75%, at least 80%, 85%, at least 86%, at least 87%, at least 88%, at least 89%, at least 90%, at least 91%, at least 92%, at least 93%, at least 94%, at least 95%, at least 96%, at least 97%, at least 98%, at least 99%, or 100% identical to any one of the sequences set forth in SEQ ID NOs: 3693-3720. In some embodiments, the DNA-binding domain of a prime editor is a programmable DNA binding domain. In some embodiments, a prime editor comprises a DNA binding domain that comprises an amino acid sequence that is at least 50%, at least 60%, at least 70%, at least 75%, at least 80%, 85%, at least 86%, at least 87%, at least 88%, at least 89%, at least 90%, at least 91%, at least 92%, at least 93%, at least 94%, at least 95%, at least 96%, at least 97%, at least 98%, at least 99%, or 100% identical to any one of the sequences set forth in Table 53. In some embodiments, the DNA binding domain comprises an amino acid sequence that has no more than 1, 2, 3, 4, 5, 6, 7, 8, 9, 10, 11, 12, 13, 14, 15, 16, 17, 18, 19, or 20 differences e.g., mutations e.g., deletions, substitutions and/or insertions compared to any one of the amino acid sequences set forth in SEQ ID NOs: 3693-3720. In some embodiments, the DNA binding domain of a prime editor is a programmable DNA binding domain. A programmable DNA binding domain refers to a protein domain that is designed to bind a specific nucleic acid sequence, e.g., a target DNA or a target RNA. In some embodiments, the DNA-binding domain is a polynucleotide programmable DNA-binding domain that can associate with a guide polynucleotide (e.g., a PEgRNA) that guides the DNA-binding domain to a specific DNA sequence, e.g. a search target sequence in a target gene. In some embodiments, the DNA-binding domain comprises a Clustered Regularly Interspaced Short Palindromic Repeats (CRISPR) Associated (Cas) protein. A Cas protein may comprise any Cas protein described herein or a functional fragment or functional variant thereof. In some embodiments, a DNA-binding domain may also comprise a zinc-finger protein domain. In other cases, a DNA-binding domain comprises a transcription activator-like effector domain (TALE). In some embodiments, the DNA-binding domain comprises a DNA nuclease. For example, the DNA-binding domain of a prime editor may comprise an RNA-guided DNA endonuclease, e.g., a Cas protein. In some embodiments, the DNA-binding domain comprises a zinc finger nuclease (ZFN) or a transcription activator like effector domain nuclease (TALEN), where one or more zinc finger motifs or TALE motifs are associated with one or more nucleases, e.g., a Fok I nuclease domain.

[0114] In some embodiments, the DNA-binding domain comprises a nuclease activity. In some embodiments, the DNA-binding domain of a prime editor comprises an endonuclease domain having single strand DNA cleavage activity. For example, the endonuclease domain may comprise a FokI nuclease domain. In some embodiments, the DNA binding domain of a prime editor comprises a nuclease having full nuclease activity. In some embodiments, the DNA binding domain of a prime editor comprises a nuclease having modified or reduced nuclease activity as compared to a wild type endonuclease domain. For example, the endonuclease domain may comprise one or more amino acid substitutions as compared to a wild type endonuclease domain. In some embodiments, the DNA-binding domain of a prime editor has a nickase activity. In some embodiments, the DNA-binding domain of a prime editor comprises a Cas protein domain that is a nickase. In some embodiments, compared to a wild type Cas protein, the Cas nickase comprises one or more amino acid substitutions in a nuclease domain that reduces or abolishes its double strand nuclease activity but retains DNA binding activity. In some embodiments, the Cas nickase comprises an amino acid substitution in a HNH domain. In some embodiments, the Cas nickase comprises an amino acid substitution in a RuvC domain.

[0115] In some embodiments, the DNA-binding domain comprises a CRISPR associated protein (Cas protein) domain. A Cas protein may be a Class 1 or a Class 2 Cas protein. A Cas protein can be a type I, type II, type III, type IV, type V Cas protein, or a type VI Cas protein. Non-limiting examples of Cas proteins include Cas1, Cas1B, Cas2, Cas3, Cas4, Cas5, Cas5d, Cas5t, Cas5h, Cas5a, Cas6, Cas7, Cas8, Cas8a, Cas8b, Cas8c, Cas9 (e.g., Csn1 or Csx12), Cas10, Cas10d, Cas12a/Cpf1, Cas12b/C2c1, Cas12c/C2c3, Cas12d/CasY, Cas12e/CasX, Cas12g, Cas12h, Cas12i, Csy1, Csy2, Csy3, Csy4, Cse1, Cse2, Cse3, Cse4, Cse5e, Csc1, Csc2, Csa5, Csn1, Csn2, Csm1, Csm2, Csm3, Csm4, Csm5, Csm6, Cmr1, Cmr3, Cmr4, Cmr5, Cmr6, Csb1, Csb2, Csb3, Csx17, Csx14, Csx10, Csx16, CsaX, Csx3, Csx1, Csx1S, Csx11, Csf1, Csf2, CsO, Csf4, Csd1, Csd2, Cst1, Cst2, Csh1, Csh2, Csa1, Csa2, Csa3, Csa4, Csa5, Type II Cas effector proteins, Type V Cas effector proteins, Type VI Cas effector proteins, CARF, DinG, Cpf1, Cas12b/C2c1, Cas12c/C2c3, Cas12b/C2c1, Cas12c/C2c3, SpCas9(K855A), eSpCas9(1.1), SpCas9-HF1, hyper accurate Cas9 variant (HypaCas9), Cas 4D, and homologues, modified or engineered variants, mutants, and/or functional fragments thereof. A Cas protein can be a chimeric Cas protein that is fused to other proteins or polypeptides. A Cas protein can be a chimera of various Cas proteins, for example, comprising domains of Cas proteins from different organisms.

[0116] A Cas protein, e.g., Cas9, can be from any suitable organism. In some aspects, the organism is Streptococcus pyogenes (S. pyogenes). In some aspects, the organism is Staphylococcus aureus (S. aureus). In some aspects, the organism is Streptococcus thermophilus (S. thermophilus). In some embodiments, the organism is Staphylococcus lugdunensis.

[0117] Non-limiting examples of suitable organism include Streptococcus pyogenes, Streptococcus thermophilus, Streptococcus sp., Staphylococcus aureus, Nocardiopsis dassonvillei, Streptomyces pristinae spiralis, Streptomyces viridochromo genes, Streptomyces viridochromogenes, Streptosporangium roseum, Streptosporangium roseum, AlicyclobacHlus acidocaldarius, Bacillus pseudomycoides, Bacillus selenitireducens, Exiguobacterium sibiricum, Lactobacillus delbrueckii, Lactobacillus salivarius, Microscilla marina, Burkholderiales bacterium, Polaromonas naphthalenivorans, Polaromonas sp., Crocosphaera watsonii, Cyanothece sp., Microcystis aeruginosa, Pseudomonas aeruginosa, Synechococcus sp., Acetohalobium arabaticum, Ammonifex degensii, Caldicelulosiruptor becscii, Candidatus Desulforudis, Clostridium botulinum, Clostridium difficile, Finegoldia magna, Natranaerobius thermophilus, Pelotomaculum thermopropionicum, Acidithiobacillus caldus, Acidithiobacillus ferrooxidans, Allochromatium vinosum, Marinobacter sp., Nitrosococcus halophilus, Nitrosococcus watsoni, Pseudoalteromonas haloplanktis, Ktedonobacter racemifer, Methanohalobium evestigatum, Anabaena variabilis, Nodularia spumigena, Nostoc sp., Arthrospira maxima, Arthrospira platensis, Arthrospira sp., Lyngbya sp., Microcoleus chthonoplastes, Oscillatoria sp., Petrotoga mobilis, Thermosipho africanus, Acaryochloris marina, Leptotrichia shahii, and Francisella novicida. In some embodiments, the organism is Streptococcus pyogenes (S. pyogenes). In some embodiments, the organism is Staphylococcus aureus (S. aureus). In some embodiments, the organism is Streptococcus thermophilus (S. thermophilus). In some embodiments, the organism is Staphylococcus lugdunensis (S. lugdunensis).

[0118] In some embodiments, a Cas protein can be derived from a variety of bacterial species including, but not limited to, Veillonella atypical, Fusobacterium nucleatum, Filifactor alocis, Solobacterium moorei, Coprococcus catus, Treponema denticola, Peptoniphilus duerdenii, Catenibacterium mitsuokai, Streptococcus mutans, Listeria innocua, Staphylococcus pseudintermedius, Acidaminococcus intestine, Olsenella uli, Oenococcus kitaharae, Bifidobacterium bifidum, Lactobacillus rhamnosus, Lactobacillus gasseri, Finegoldia magna, Mycoplasma mobile, Mycoplasma gallisepticum, Mycoplasma ovipneumoniae, Mycoplasma canis, Mycoplasma synoviae, Eubacterium rectale, Streptococcus thermophilus, Eubacterium dolichum, Lactobacillus coryniformis subsp. Torquens, Ilyobacter polytropus, Ruminococcus albus, Akkermansia muciniphila, Acidothermus cellulolyticus, Bifidobacterium longum, Bifidobacterium dentium, Corynebacterium diphtheria, Elusimicrobium minutum, Nitratifractor salsuginis, Sphaerochaeta globus, Fibrobacter succinogenes subsp. Succinogenes, Bacteroides fragilis, Capnocytophaga ochracea, Rhodopseudomonas palustris, Prevotella micans, Prevotella ruminicola, Flavobacterium columnare, Aminomonas paucivorans, Rhodospirillum rubrum, Candidatus Puniceispirillum marinum, Verminephrobacter eiseniae, Ralstonia syzygii, Dinoroseobacter shibae, Azospirillum, Nitrobacter hamburgensis, Bradyrhizobium, Wolinella succinogenes, Campylobacter jejuni subsp. Jejuni, Helicobacter mustelae, Bacillus cereus, Acidovorax ebreus, Clostridium perfringens, Parvibaculum lavamentivorans, Roseburia intestinalis, Neisseria meningitidis, Pasteurella multocida subsp. Multocida, Sutterella wadsworthensis, proteobacterium, Legionella pneumophila, Parasutterella excrementihominis, Wolinella succinogenes, and Francisella novicida.

[0119] In some embodiments, a Cas protein, e.g., Cas9, can be a wild type or a modified form of a Cas protein. In some embodiments, a Cas protein, e.g., Cas9, can be a nuclease active variant, nuclease inactive variant, a nickase, or a functional variant or functional fragment of a wild type Cas protein. In some embodiments, a Cas protein, e.g., Cas9, can be a wild type or a modified form of a Cas protein. A Cas protein, e.g., Cas9, can be a nuclease active variant, nuclease inactive variant, a nickase, or a functional variant or functional fragment of a wild type Cas protein. In some embodiments, a Cas protein, e.g., Cas9, can comprise an amino acid change such as a deletion, insertion, substitution, fusion, chimera, or any combination thereof relative to a corresponding wild-type version of the Cas protein. In some embodiments, a Cas protein can be a polypeptide with at least about 50%, 60%, 70%, 80%, 90%, 91%, 92%, 93%, 94%, 95%, 96%, 97%, 98%, 99%, or 100% sequence identity or sequence similarity to a wild type exemplary Cas protein.

[0120] A Cas protein, e.g., Cas9, can comprise one or more domains. Non-limiting examples of Cas domains include, guide nucleic acid recognition and/or binding domain, nuclease domains (e.g., DNase or RNase domains, RuvC, HNH), DNA binding domain, RNA binding domain, helicase domains, protein-protein interaction domains, and dimerization domains. In various embodiments, a Cas protein comprises a guide nucleic acid recognition and/or binding domain can interact with a guide nucleic acid, and one or more nuclease domains that comprise catalytic activity for nucleic acid cleavage.

[0121] In some embodiments, a Cas protein, e.g., Cas9, comprises one or more nuclease domains. A Cas protein can comprise an amino acid sequence having at least about 50%, 60%, 70%, 80%, 90%, 91%, 92%, 93%, 94%, 95%, 96%, 97%, 98%, 99%, or 100% sequence identity to a nuclease domain (e.g., RuvC domain, HNH domain) of a wild-type Cas protein. In some embodiments, a Cas protein comprises a single nuclease domain. For example, a Cpf1 may comprise a RuvC domain but lacks HNH domain. In some embodiments, a Cas protein comprises two nuclease domains, e.g., a Cas9 protein can comprise an HNH nuclease domain and a RuvC nuclease domain.

[0122] In some embodiments, a prime editor comprises a Cas protein, e.g., Cas9, wherein all nuclease domains of the Cas protein are active. In some embodiments, a prime editor comprises a Cas protein having one or more inactive nuclease domains. One or a plurality of the nuclease domains (e.g., RuvC, HNH) of a Cas protein can be deleted or mutated so that they are no longer functional or comprise reduced nuclease activity. In some embodiments, a Cas protein, e.g., Cas9, comprising mutations in a nuclease domain has reduced (e.g. nickase) or abolished nuclease activity while maintaining its ability to target a nucleic acid locus at a search target sequence when complexed with a guide nucleic acid, e.g. a PEgRNA.

[0123] In some embodiments, a prime editor comprises a Cas nickase that can bind to the target gene in a sequence-specific manner and generate a single-strand break at a protospacer within double-stranded DNA in the target gene, but not a double-strand break. For example, the Cas nickase can cleave the edit strand or the non-edit strand of the target gene, but may not cleave both. In some embodiments, a prime editor comprises a Cas nickase comprising two nuclease domains (e.g., Cas9), with one of the two nuclease domains modified to lack catalytic activity or deleted. In some embodiments, the Cas nickase of a prime editor comprises a nuclease inactive RuvC domain and a nuclease active HNH domain. In some embodiments, the Cas nickase of a prime editor comprises a nuclease inactive HNH domain and a nuclease active RuvC domain. In some embodiments, a prime editor comprises a Cas9 nickase having an amino acid substitution in the RuvC domain e.g., an amino acid substitution that reduces or abolishes nuclease activity of the RuvC domain. In some embodiments, the Cas9 nickase comprises a D10X amino acid substitution compared to a wild type S. pyogenes Cas9, wherein X is any amino acid other than D. In some embodiments, a prime editor comprises a Cas9 nickase having an amino acid substitution in the HNH domain e.g., an amino acid substitution that reduces or abolishes nuclease activity of the HNH domain. In some embodiments, the Cas9 nickase comprises a H840X amino acid substitution compared to a wild type S. pyogenes Cas9, wherein X is any amino acid other than H.

[0124] In some embodiments, a prime editor comprises a Cas protein that can bind to the target gene in a sequence-specific manner but lacks or has abolished nuclease activity and may not cleave either strand of a double stranded DNA in a target gene. Abolished activity or lacking activity can refer to an enzymatic activity less than 1%, less than 2%, less than 3%, less than 4%, less than 5%, less than 6%, less than 7%, less than 8%, less than 9%, or less than 10% activity compared to a wild-type exemplary activity (e.g., wild-type Cas9 nuclease activity). In some embodiments, a Cas protein of a prime editor completely lacks nuclease activity. A nuclease, e.g., Cas9, that lacks nuclease activity may be referred to as nuclease inactive or “nuclease dead” (abbreviated by “d”). A nuclease dead Cas protein (e.g., dCas, dCas9) can bind to a target polynucleotide but may not cleave the target polynucleotide. In some embodiments, a dead Cas protein is a dead Cas9 protein. In some embodiments, a prime editor comprises a nuclease dead Cas protein wherein all of the nuclease domains (e.g., both RuvC and HNH nuclease domains in a Cas9 protein; RuvC nuclease domain in a Cpf1 protein) are mutated to lack catalytic activity, or are deleted.

[0125] A Cas protein can be modified. A Cas protein, e.g., Cas9, can be modified to increase or decrease nucleic acid binding affinity, nucleic acid binding specificity, and/or enzymatic activity. Cas proteins can also be modified to change any other activity or property of the protein, such as stability. For example, one or more nuclease domains of the Cas protein can be modified, deleted, or inactivated, or a Cas protein can be truncated to remove domains that are not essential for the function of the protein or to optimize (e.g., enhance or reduce) the activity of the Cas protein.

[0126] A Cas protein can be a fusion protein. For example, a Cas protein can be fused to a cleavage domain, an epigenetic modification domain, a transcriptional regulation domain, or a polymerase domain. A Cas protein can also be fused to a heterologous polypeptide providing increased or decreased stability. The fused domain or heterologous polypeptide can be located at the N-terminus, the C-terminus, or internally within the Cas protein.

[0127] In some embodiments, the Cas protein of a prime editor is a Class 2 Cas protein. In some embodiments, the Cas protein is a type II Cas protein. In some embodiments, the Cas protein is a Cas9 protein, a modified version of a Cas9 protein, a Cas9 protein homolog, mutant, variant, or a functional fragment thereof. As used herein, a Cas9, Cas9 protein, Cas9 polypeptide or a Cas9 nuclease refers to an RNA guided nuclease comprising one or more Cas9 nuclease domains and a Cas9 gRNA binding domain having the ability to bind a guide polynucleotide, e.g., a PEgRNA. A Cas9 protein may refer to a wild type Cas9 protein from any organism or a homolog, ortholog, or paralog from any organisms; any functional mutants or functional variants thereof; or any functional fragments or domains thereof. In some embodiments, a prime editor comprises a full-length Cas9 protein. In some embodiments, the Cas9 protein can generally comprises at least about 50%, 60%, 70%, 80%, 90%, 100% sequence identity to a wild type reference Cas9 protein (e.g., Cas9 from S. pyogenes). In some embodiments, the Cas9 comprises an amino acid change such as a deletion, insertion, substitution, fusion, chimera, or any combination thereof as compared to a wild type reference Cas9 protein.

[0128] In some embodiments, a Cas9 protein can comprise a Cas9 protein from Streptococcus pyogenes (Sp), Staphylococcus aureus (Sa), Streptococcus canis (Sc), Streptococcus thermophilus (St), Staphylococcus lugdunensis (Slu), Neisseria meningitidis (Nm), Campylobacter jejuni (Cj), Francisella novicida (Fn), or Treponema denticola (Td), or any Cas9 homolog or ortholog from an organism known in the art. In some embodiments, a Cas9 polypeptide is a SpCas9 polypeptide, e.g., comprising an amino acid sequence as set forth in NCBI Accession No. WP_038431314 or a fragment or variant thereof. In some embodiments, a Cas9 polypeptide is a SaCas9 polypeptide, e.g., comprising an amino acid sequence as set forth in Uniprot Accession No. J7RUA5 or a fragment or variant thereof. In some embodiments, a Cas9 polypeptide is a ScCas9 polypeptide, e.g., comprising an amino acid sequence as set forth in Uniprot Accession No. AOA3P5YA78 or a fragment or variant thereof. In some embodiments, a Cas9 polypeptide is a StCas9 polypeptide, e.g., comprising an amino acid sequence as set forth in NCBI Accession No. WP_007896501.1 or a fragment or variant thereof. In some embodiments, a Cas9 polypeptide is a SluCas9 polypeptide, e.g., comprising an amino acid sequence as set forth in any of NCBI Accession No. WP_230580236.1 or WP_250638315.1 or WP_242234150.1, WP_241435384.1, WP_002460848.1, KAK58371.1, or a fragment or variant thereof. In some embodiments, a Cas9 polypeptide is a NmCas9 polypeptide, e.g., comprising an amino acid sequence as set forth in any of NCBI Accession No. WP_002238326.1 or WP_061704949.1 or a fragment or variant thereof. In some embodiments, a Cas9 polypeptide is a CjCas9 polypeptide, e.g., comprising an amino acid sequence as set forth in any of NCBI Accession No. WP_100612036.1, WP 116882154.1, WP 116560509.1, WP_116484194.1, WP_116479303.1, WP_115794652.1, WP_100624872.1, or a fragment or variant thereof. In some embodiments, a Cas9 polypeptide is a FnCas9 polypeptide, e.g., comprising the amino acid sequence as set forth in Uniprot Accession No. AOQ5Y3 or a fragment or variant thereof. In some embodiments, a Cas9 polypeptide is a TdCas9 polypeptide, e.g., comprising the amino acid sequence as set forth in NCBI Accession No. WP_147625065.1 or a fragment or variant thereof. In some embodiments, a Cas9 polypeptide is a chimera comprising domains from two or more of the organisms described herein or those known in the art. In some embodiments, a Cas9 polypeptide is a Cas9 polypeptide from Streptococcus macacae, e.g., comprising the amino acid sequence as set forth in NCBI Accession No. WP_003079701.1 or a fragment or variant thereof. In some embodiments, a Cas9 polypeptide is a Cas9 polypeptide generated by replacing a PAM interaction domain of a SpCas9 with that of a Streptococcus macacae Cas9 (Spy-mac Cas9). Exemplary Cas sequences are provided in Table 53 below.

[0129] In some embodiments, a Cas9 protein comprises an amino acid sequence that is at least 50%, at least 60%, at least 70%, at least 75%, at least 80%, 85%, at least 86%, at least 87%, at least 88%, at least 89%, at least 90%, at least 91%, at least 92%, at least 93%, at least 94%, at least 95%, at least 96%, at least 97%, at least 98%, at least 99%, or 100% identical to any one of the sequences set forth in SEQ ID NOs: 3693-3720. In some embodiments, a Cas9 protein is a Cas9 nickase that comprises an amino acid sequence that is at least 50%, at least 60%, at least 70%, at least 75%, at least 80%, 85%, at least 86%, at least 87%, at least 88%, at least 89%, at least 90%, at least 91%, at least 92%, at least 93%, at least 94%, at least 95%, at least 96%, at least 97%, at least 98%, at least 99%, or 100% identical to any one of the sequences set forth in SEQ ID NOs: 3694, 3695, 3696, 3698, 3699, 3701, 3702, 3704, 3705, 3707, 3708, 3710, 3711, 3713, 3714, 3716, 3717, 3719, or 3720. In some embodiments, a Cas9 protein comprises an amino acid sequence that is selected from the group consisting of SEQ ID NOs: 3693-3720. In some embodiments, a prime editor comprises a Cas9 protein that comprises an amino acid sequence that lacks a N-terminus methionine relative to an amino acid sequence set forth in any one of SEQ ID NOs: 3693, 3694, 3697, 3698, 3700, 3701, 3703, 3704, 3706, 3707, 3709, 3710, 3712, 3713, 3715, 3716, 3718, or 3719. In some embodiments, the prime editing compositions or prime editing systems disclosed herein comprises a polynucleotide (e.g., a DNA, or an RNA, e.g., an mRNA) that encodes a Cas9 protein that comprises an amino acid sequence that is at least 50%, at least 60%, at least 70%, at least 75%, at least 80%, 85%, at least 86%, at least 87%, at least 88%, at least 89%, at least 90%, at least 91%, at least 92%, at least 93%, at least 94%, at least 95%, at least 96%, at least 97%, at least 98%, at least 99%, or 100% identical to any one of the sequences set forth in SEQ ID NOs: 3693-3720.

[0130] In some embodiments, a Cas9 protein comprises a Cas9 protein from Streptococcus pyogenes (Sp), e.g., as according to NC_002737.2:854751-858857 or the protein encoded by UniProt Q99ZW2, e.g., as according to SEQ ID NO: 3693. In some embodiments, a prime editor comprises a Cas9 protein (e.g., a SpCas9) as according to any one of the sequences set forth in SEQ ID NOs: 3693-3696 or a variant thereof. In some embodiments, the Cas9 protein is a SpCas9. In some embodiments, a SpCas9 can be a wild type SpCas9, a SpCas9 variant, or a nickase SpCas9. In some embodiments, the SpCas9 lacks the N-terminus methionine relative to a corresponding SpCas9 (e.g., a wild type SpCas9, a SpCas9 variant or a nickase SpCas9). In some embodiments, a prime editor comprises a Cas9 protein or a variant thereof not including the N-terminus methionine. In some embodiments, a wild type SpCas9 comprises an amino acid sequence set forth in SEQ ID NO: 3693. In some embodiments, a prime editor comprises a Cas9 protein comprising one or more mutations (e.g., amino acid substitutions, insertions and/or deletions) relative to a corresponding wild type Cas9 protein (e.g., a wild type SpCas9). In some embodiments, the Cas9 protein comprising one or more mutations relative to a wild type Cas9 (e.g., a wild type SpCas9) protein comprises an amino acid sequence set forth in SEQ ID NO: 3694, SEQ ID NO:3695 or SEQ ID NO: 3696. Exemplary Streptococcus pyogenes Cas9 (SpCas9) amino acid sequence useful in the prime editors disclosed herein are provided below in SEQ ID NOs: 3693-3696 or 3703-3708.

[0131] In some embodiments, a prime editor comprises a Cas9 protein (e.g., a SluCas9) as according to any one of the SEQ ID NOS: 3697-3699 or a variant thereof. In some embodiments, a prime editor comprises a Cas9 protein from Staphylococcus lugdunensis (SluCas9) e.g., as according to any one of the SEQ ID NOs: 3697-3699 or a variant thereof. In some embodiments, the Cas9 protein is a SluCas9. In some embodiments, a SluCas9 can be a wild type SluCas9, a SluCas9 variant, or a nickase SluCas9. In some embodiments, the SluCas9 lacks the N-terminus methionine relative to a corresponding SluCas9 (e.g., a wild type SluCas9, a SluCas9 variant or a nickase SluCas9). In some embodiments, a wild type SluCas9 comprises an amino acid sequence set forth in SEQ ID NO: 3697. In some embodiments, a prime editor comprises a Cas9 protein comprising one or more mutations (e.g., amino acid substitutions, insertions and/or deletions) relative to a corresponding wild type Cas9 protein (e.g., a wild type SluCas9). In some embodiments, the Cas9 protein comprising one or mutations relative to a wild type Cas9 protein comprises an amino acid sequence set forth in SEQ ID NO: 3698 or SEQ ID NO: 3699. Exemplary Staphylococcus lugdunensis Cas9 (SluCas9) amino acid sequence useful in the prime editors disclosed herein are provided below in SEQ ID NOs: 3697-3699.

[0132] In some embodiments, a prime editor comprises a Cas9 protein from Staphylococcus aureus (SaCas9) e.g., as according to any of the SEQ ID NOS: 3700-3702, or a variant thereof. In some embodiments, a prime editor comprises a Cas9 protein from Staphylococcus aureus (SaCas9) e.g., as according to any one of the SEQ ID NOS: 3700-3702, or a variant thereof. In some embodiments, the Cas9 protein is a SaCas9. In some embodiments, a SaCas9 can be a wild type SaCas9, a SaCas9 variant, or a nickase SaCas9. In some embodiments, the SaCas9 lacks the N-terminus methionine relative to a corresponding SaCas9 (e.g., a wild type SaCas9, a SaCas9 variant or a nickase SaCas9). In some embodiments, a wild type SaCas9 comprises an amino acid sequence set forth in SEQ ID NO: 3700. In some embodiments, a prime editor comprises a Cas9 protein comprising one or more mutations (e.g., amino acid substitutions, insertions and/or deletions relative to a corresponding wild type Cas9 protein (e.g., a wild type SaCas9). In some embodiments, the Cas9 protein comprising one or more mutations relative to a wild type Cas9 protein comprises an amino acid sequence set forth in SEQ ID NO: 3701 or SEQ ID NO: 3702. Exemplary Staphylococcus aureus Cas9 (SaCas9) amino acid sequence useful in the prime editors disclosed herein are provided below in SEQ ID NOs: 3700-3702.

[0133] In some embodiments, a prime editor comprises a Cas protein, e.g., a Cas9 variant, comprising modifications that allow altered PAM recognition. Exemplary Cas9 protein amino acid sequence (e.g., Cas9 variant with altered PAM recognition specificities) that are useful in the Prime editors of the disclosure are provided below in SEQ ID NOs: 3703-3711, 3718-3720. In some embodiments, a prime editor comprises a Cas9 protein as according to any one of the sequences set forth in SEQ ID NOs: 3703-3711, 3718-3720 or a variant thereof. In some embodiments, the Cas9 protein is a Cas9 variant, for example, a SpCas9 variant (e.g., SpCas9-NG, SpCas9-NGA, SpRY, or SpG). In some embodiments, the Cas9 protein lacks the N-terminus methionine relative to a corresponding Cas9 protein (e.g., a Cas9 variant set forth in any one of SEQ ID NOs: 3703, 3704, 3706, 3707, 3709, 3710, 3718, or 3719). In some embodiments, a prime editor comprises a Cas9 protein (e.g., a Cas9 variant), having an amino acid sequence as according to any one of SEQ ID NOs: 3703, 3704, 3706, 3707, 3709, 3710, 3718, or 3719 not including the N-terminus methionine. In some embodiments, a prime editor comprises a Cas9 protein comprising one or more mutations (e.g., amino acid substitutions, insertions and/or deletions) relative to a corresponding Cas9 protein (e.g., a Cas9 protein set forth in any one of SEQ ID NOs: 3703, 3706, 3709, or 3718). In some embodiments, the Cas9 protein comprising one or mutations relative to a corresponding Cas9 protein comprises an amino acid sequence set forth in any one of SEQ ID NOs: 3704, 3705, 3707, 3708, 3710, 3711, 3719, or 3720.

[0134] In some embodiments, a Cas9 protein is a chimeric Cas9, e.g., modified Cas9, e.g., synthetic RNA-guided nucleases (sRGNs), e.g., modified by DNA family shuffling, e.g., sRGN3.1, sRGN3.3. In some embodiments, the DNA family shuffling comprises, fragmentation and reassembly of parental Cas9 genes, e.g., one or more of Cas9s from Staphylococcus hyicus (Shy), Staphylococcus lugdunensis (Slu), Staphylococcus microti (Smi), and Staphylococcus pasteuri (Spa). In some embodiments, a modified sluCas9 shows increased editing efficiency and/or specificity relative to a sluCas9 that is not modified. In some embodiments, a Cas9, e.g., a sRGN shows ability to cleave a 5′-NNGG-3′ PAM-containing target. In some embodiments, a prime editor comprises a Cas9 protein (e.g., a chimeric Cas9), e.g., as according any one of the sequences set forth in SEQ ID NOs: 3712-3717, or a variant thereof. Exemplary amino acid sequences of Cas9 protein (e.g., sRGN) useful in the prime editors disclosed herein are provided below in SEQ ID NOs: 3712-3717. In some embodiments, a prime editor comprises a Cas9 protein, that lacks a N-terminus methionine relative to SEQ ID NO: 3712, 3713, 3715, or 3716. In some embodiments, a prime editor comprises a Cas9 protein comprising one or more mutations (e.g., amino acid substitutions, insertions and/or deletions) relative to a corresponding Cas9 protein (e.g., a Cas9 protein set forth in SEQ ID NO: 3712 or SEQ ID NO: 3715). In some embodiments, the Cas9 protein comprising one or mutations relative to a corresponding Cas9 protein comprises an amino acid sequence set forth in any one of SEQ ID NOs: 3713, 3714, 3716, or 3717.

TABLE 53
Exemplary Cas protein sequences

| SEQ | | |
|---|---|---|
| ID | Sequence | |
| NO: | description | Amino acid sequence |
| 3693 | wild type | MDKKYSIGLDIGTNSVGWAVITDEYKVPSKKFKVLGNTDRHSIKKNLIGALLFDSGETAEATRL |
| | Streptococcus | KRTARRRYTRRKNRICYLQEIFSNEMAKVDDSFFHRLEESFLVEEDKKHERHPIFGNIVDEVAY |
| | Pyogenes | HEKYPTIYHLRKKLVDSTDKADLRLIYLALAHMIKFRGHFLIEGDLNPDNSDVDKLFIQLVQTYN |
| | Cas9 (SpCas9) | QLFEENPINASGVDAKAILSARLSKSRRLENLIAQLPGEKKNGLFGNLIALSLGLTPNFKSNFDL |
| | | AEDAKLQLSKDTYDDDLDNLLAQIGDQYADLFLAAKNLSDAILLSDILRVNTEITKAPLSASMIK |
| | | RYDEHHQDLTLLKALVRQQLPEKYKEIFFDQSKNGYAGYIDGGASQEEFYKFIKPILEKMDGTE |
| | | ELLVKLNREDLLRKQRTFDNGSIPHQIHLGELHAILRRQEDFYPFLKDNREKIEKILTFRIPYYVG |
| | | PLARGNSRFAWMTRKSEETITPWNFEEVVDKGASAQSFIERMTNFDKNLPNEKVLPKHSLLY |
| | | EYFTVYNELTKVKYVTEGMRKPAFLSGEQKKAIVDLLFKTNRKVTVKQLKEDYFKKIECFDSVEI |
| | | SGVEDRFNASLGTYHDLLKIIKDKDFLDNEENEDILEDIVLTLTLFEDREMIEERLKTYAHLFDDK |
| | | VMKQLKRRRYTGWGRLSRKLINGIRDKQSGKTILDFLKSDGFANRNFMQLIHDDSLTFKEDI |
| | | QKAQVSGQGDSLHEHIANLAGSPAIKKGILQTVKVVDELVKVMGRHKPENIVIEMARENQT |
| | | TQKGQKNSRERMKRIEEGIKELGSQILKEHPVENTQLQNEKLYLYYLQNGRDMYVDQELDIN |
| | | RLSDYDVDHIVPQSFLKDDSIDNKVLTRSDKNRGKSDNVPSEEVVKKMKNYWRQLLNAKLIT |
| | | QRKFDNLTKAERGGLSELDKAGFIKRQLVETRQITKHVAQILDSRMNTKYDENDKLIREVKVIT |
| | | LKSKLVSDFRKDFQFYKVREINNYHHAHDAYLNAVVGTALIKKYPKLESEFVYGDYKVYDVRK |
| | | MIAKSEQEIGKATAKYFFYSNIMNFFKTEITLANGEIRKRPLIETNGETGEIVWDKGRDFATVR |
| | | KVLSMPQVNIVKKTEVQTGGFSKESILPKRNSDKLIARKKDWDPKKYGGFDSPTVAYSVLVVA |
| | | KVEKGKSKKLKSVKELLGITIMERSSFEKNPIDFLEAKGYKEVKKDLIIKLPKYSLFELENGRKRM |
| | | LASAGELQKGNELALPSKYVNFLYLASHYEKLKGSPEDNEQKQLFVEQHKHYLDEIIEQISEFSK |
| | | RVILADANLDKVLSAYNKHRDKPIREQAENIIHLFTLTNLGAPAAFKYFDTTIDRKRYTSTKEVL |
| | | DATLIHQSITGLYETRIDLSQLGGD |
| 3694 | SpCas9 | MDKKYSIGLDIGTNSVGWAVITDEYKVPSKKFKVLGNTDRHSIKKNLIGALLFDSGETAEATRL |
| | H840A | KRTARRRYTRRKNRICYLQEIFSNEMAKVDDSFFHRLEESFLVEEDKKHERHPIFGNIVDEVAY |
| | nickase | HEKYPTIYHLRKKLVDSTDKADLRLIYLALAHMIKFRGHFLIEGDLNPDNSDVDKLFIQLVQTYN |
| | | QLFEENPINASGVDAKAILSARLSKSRRLENLIAQLPGEKKNGLFGNLIALSLGLTPNFKSNFDL |
| | | AEDAKLQLSKDTYDDDLDNLLAQIGDQYADLFLAAKNLSDAILLSDILRVNTEITKAPLSASMIK |
| | | RYDEHHQDLTLLKALVRQQLPEKYKEIFFDQSKNGYAGYIDGGASQEEFYKFIKPILEKMDGTE |
| | | ELLVKLNREDLLRKQRTFDNGSIPHQIHLGELHAILRRQEDFYPFLKDNREKIEKILTFRIPYYVG |
| | | PLARGNSRFAWMTRKSEETITPWNFEEVVDKGASAQSFIERMTNFDKNLPNEKVLPKHSLLY |
| | | EYFTVYNELTKVKYVTEGMRKPAFLSGEQKKAIVDLLFKTNRKVTVKQLKEDYFKKIECFDSVEI |
| | | SGVEDRFNASLGTYHDLLKIIKDKDFLDNEENEDILEDIVLTLTLFEDREMIEERLKTYAHLFDDK |
| | | VMKQLKRRRYTGWGRLSRKLINGIRDKQSGKTILDFLKSDGFANRNFMQLIHDDSLTFKEDI |
| | | QKAQVSGQGDSLHEHIANLAGSPAIKKGILQTVKVVDELVKVMGRHKPENIVIEMARENQT |
| | | TQKGQKNSRERMKRIEEGIKELGSQILKEHPVENTQLQNEKLYLYYLQNGRDMYVDQELDIN |
| | | RLSDYDVDAIVPQSFLKDDSIDNKVLTRSDKNRGKSDNVPSEEVVKKMKNYWRQLLNAKLIT |
| | | QRKFDNLTKAERGGLSELDKAGFIKRQLVETRQITKHVAQILDSRMNTKYDENDKLIREVKVIT |
| | | LKSKLVSDFRKDFQFYKVREINNYHHAHDAYLNAVVGTALIKKYPKLESEFVYGDYKVYDVRK |
| | | MIAKSEQEIGKATAKYFFYSNIMNFFKTEITLANGEIRKRPLIETNGETGEIVWDKGRDFATVR |
| | | KVLSMPQVNIVKKTEVQTGGFSKESILPKRNSDKLIARKKDWDPKKYGGFDSPTVAYSVLVVA |
| | | KVEKGKSKKLKSVKELLGITIMERSSFEKNPIDFLEAKGYKEVKKDLIIKLPKYSLFELENGRKRM |
| | | LASAGELQKGNELALPSKYVNFLYLASHYEKLKGSPEDNEQKQLFVEQHKHYLDEIIEQISEFSK |
| | | RVILADANLDKVLSAYNKHRDKPIREQAENIIHLFTLTNLGAPAAFKYFDTTIDRKRYTSTKEVL |
| | | DATLIHQSITGLYETRIDLSQLGGD |
| 3695 | Met(−) | DKKYSIGLDIGTNSVGWAVITDEYKVPSKKFKVLGNTDRHSIKKNLIGALLFDSGETAEATRLK |
| | SpCas9 | RTARRRYTRRKNRICYLQEIFSNEMAKVDDSFFHRLEESFLVEEDKKHERHPIFGNIVDEVAYH |
| | H840A | EKYPTIYHLRKKLVDSTDKADLRLIYLALAHMIKFRGHFLIEGDLNPDNSDVDKLFIQLVQTYN |
| | nickase | QLFEENPINASGVDAKAILSARLSKSRRLENLIAQLPGEKKNGLFGNLIALSLGLTPNFKSNFDL |
| | | AEDAKLQLSKDTYDDDLDNLLAQIGDQYADLFLAAKNLSDAILLSDILRVNTEITKAPLSASMIK |
| | | RYDEHHQDLTLLKALVRQQLPEKYKEIFFDQSKNGYAGYIDGGASQEEFYKFIKPILEKMDGTE |
| | | ELLVKLNREDLLRKQRTFDNGSIPHQIHLGELHAILRRQEDFYPFLKDNREKIEKILTFRIPYYVG |
| | | PLARGNSRFAWMTRKSEETITPWNFEEVVDKGASAQSFIERMTNFDKNLPNEKVLPKHSLLY |
| | | EYFTVYNELTKVKYVTEGMRKPAFLSGEQKKAIVDLLFKTNRKVTVKQLKEDYFKKIECFDSVEI |
| | | SGVEDRFNASLGTYHDLLKIIKDKDFLDNEENEDILEDIVLTLTLFEDREMIEERLKTYAHLFDDK |
| | | VMKQLKRRRYTGWGRLSRKLINGIRDKQSGKTILDFLKSDGFANRNFMQLIHDDSLTFKEDI |
| | | QKAQVSGQGDSLHEHIANLAGSPAIKKGILQTVKVVDELVKVMGRHKPENIVIEMARENQT |
| | | TQKGQKNSRERMKRIEEGIKELGSQILKEHPVENTQLQNEKLYLYYLQNGRDMYVDQELDIN |
| | | RLSDYDVDAIVPQSFLKDDSIDNKVLTRSDKNRGKSDNVPSEEVVKKMKNYWRQLLNAKLIT |
| | | QRKFDNLTKAERGGLSELDKAGFIKRQLVETRQITKHVAQILDSRMNTKYDENDKLIREVKVIT |
| | | LKSKLVSDFRKDFQFYKVREINNYHHAHDAYLNAVVGTALIKKYPKLESEFVYGDYKVYDVRK |
| | | MIAKSEQEIGKATAKYFFYSNIMNFFKTEITLANGEIRKRPLIETNGETGEIVWDKGRDFATVR |
| | | KVLSMPQVNIVKKTEVQTGGFSKESILPKRNSDKLIARKKDWDPKKYGGFDSPTVAYSVLVVA |
| | | KVEKGKSKKLKSVKELLGITIMERSSFEKNPIDFLEAKGYKEVKKDLIIKLPKYSLFELENGRKRM |
| | | LASAGELQKGNELALPSKYVNFLYLASHYEKLKGSPEDNEQKQLFVEQHKHYLDEIIEQISEFSK |
| | | RVILADANLDKVLSAYNKHRDKPIREQAENIIHLFTLTNLGAPAAFKYFDTTIDRKRYTSTKEVL |
| | | DATLIHQSITGLYETRIDLSQLGGD |
| 3696 | Met(−) CAS9 | DKKYSIGLDIGTNSVGWAVITDEYKVPSKKFKVLGNTDRHSIKKNLIGALLFDSGETAEATRLK |
| | (R221K N394K | RTARRRYTRRKNRICYLQEIFSNEMAKVDDSFFHRLEESFLVEEDKKHERHPIFGNIVDEVAYH |
| | H840A) | EKYPTIYHLRKKLVDSTDKADLRLIYLALAHMIKFRGHFLIEGDLNPDNSDVDKLFIQLVQTYN |
| | nickase | QLFEENPINASGVDAKAILSARLSKSRKLENLIAQLPGEKKNGLFGNLIALSLGLTPNFKSNFDL |
| | | AEDAKLQLSKDTYDDDLDNLLAQIGDQYADLFLAAKNLSDAILLSDILRVNTEITKAPLSASMIK |
| | | RYDEHHQDLTLLKALVRQQLPEKYKEIFFDQSKNGYAGYIDGGASQEEFYKFIKPILEKMDGTE |
| | | ELLVKLKREDLLRKQRTFDNGSIPHQIHLGELHAILRRQEDFYPFLKDNREKIEKILTFRIPYYVG |
| | | PLARGNSRFAWMTRKSEETITPWNFEEVVDKGASAQSFIERMTNFDKNLPNEKVLPKHSLLY |
| | | EYFTVYNELTKVKYVTEGMRKPAFLSGEQKKAIVDLLFKTNRKVTVKQLKEDYFKKIECFDSVEI |
| | | SGVEDRFNASLGTYHDLLKIIKDKDFLDNEENEDILEDIVLTLTLFEDREMIEERLKTYAHLFDDK |
| | | VMKQLKRRRYTGWGRLSRKLINGIRDKQSGKTILDFLKSDGFANRNFMQLIHDDSLTFKEDI |
| | | QKAQVSGQGDSLHEHIANLAGSPAIKKGILQTVKVVDELVKVMGRHKPENIVIEMARENQT |
| | | TQKGQKNSRERMKRIEEGIKELGSQILKEHPVENTQLQNEKLYLYYLQNGRDMYVDQELDIN |
| | | RLSDYDVDAIVPQSFLKDDSIDNKVLTRSDKNRGKSDNVPSEEVVKKMKNYWRQLLNAKLIT |
| | | QRKFDNLTKAERGGLSELDKAGFIKRQLVETRQITKHVAQILDSRMNTKYDENDKLIREVKVIT |
| | | LKSKLVSDFRKDFQFYKVREINNYHHAHDAYLNAVVGTALIKKYPKLESEFVYGDYKVYDVRK |
| | | MIAKSEQEIGKATAKYFFYSNIMNFFKTEITLANGEIRKRPLIETNGETGEIVWDKGRDFATVR |
| | | KVLSMPQVNIVKKTEVQTGGFSKESILPKRNSDKLIARKKDWDPKKYGGFDSPTVAYSVLVVA |
| | | KVEKGKSKKLKSVKELLGITIMERSSFEKNPIDFLEAKGYKEVKKDLIIKLPKYSLFELENGRKRM |
| | | LASAGELQKGNELALPSKYVNFLYLASHYEKLKGSPEDNEQKQLFVEQHKHYLDEIIEQISEFSK |
| | | RVILADANLDKVLSAYNKHRDKPIREQAENIIHLFTLTNLGAPAAFKYFDTTIDRKRYTSTKEVL |
| | | DATLIHQSITGLYETRIDLSQLGGD |
| 3697 | wild type | MNQKFILGLDIGITSVGYGLIDYETKNIIDAGVRLFPEANVENNEGRRSKRGSRRLKRRRIHRLE |
| | Staphylococcus | RVKKLLEDYNLLDQSQIPQSTNPYAIRVKGLSEALSKDELVIALLHIAKRRGIHKIDVIDSNDDV |
| | lugdunensis | GNELSTKEQLNKNSKLLKDKFVCQIQLERMNEGQVRGEKNRFKTADIIKEIIQLLNVQKNFHQ |
| | (Slu)Cas9 | LDENFINKYIELVEMRREYFEGPGKGSPYGWEGDPKAWYETLMGHCTYFPDELRSVKYAYSA |
| | | DLFNALNDLNNLVIQRDGLSKLEYHEKYHIIENVFKQKKKPTLKQIANEINVNPEDIKGYRITKS |
| | | GKPQFTEFKLYHDLKSVLFDQSILENEDVLDQIAEILTIYQDKDSIKSKLTELDILLNEEDKENIAQ |
| | | LTGYTGTHRLSLKCIRLVLEEQWYSSRNQMEIFTHLNIKPKKINLTAANKIPKAMIDEFILSPVV |
| | | KRTFGQAINLINKIIEKYGVPEDIIIELARENNSKDKQKFINEMQKKNENTRKRINEIIGKYGNQ |
| | | NAKRLVEKIRLHDEQEGKCLYSLESIPLEDLLNNPNHYEVDHIIPRSVSFDNSYHNKVLVKQSE |
| | | NSKKSNLTPYQYFNSGKSKLSYNQFKQHILNLSKSQDRISKKKKEYLLEERDINKFEVQKEFINR |
| | | NLVDTRYATRELTNYLKAYFSANNMNVKVKTINGSFTDYLRKVWKFKKERNHGYKHHAEDA |
| | | LIIANADFLFKENKKLKAVNSVLEKPEIESKQLDIQVDSEDNYSEMFIIPKQVQDIKDFRNFKYS |
| | | HRVDKKPNRQLINDTLYSTRKKDNSTYIVQTIKDIYAKDNTTLKKQFDKSPEKFLMYQHDPRT |
| | | FEKLEVIMKQYANEKNPLAKYHEETGEYLTKYSKKNNGPIVKSLKYIGNKLGSHLDVTHQFKSS |
| | | TKKLVKLSIKPYRFDVYLTDKGYKFITISYLDVLKKDNYYYIPEQKYDKLKLGKAIDKNAKFIASFY |
| | | KNDLIKLDGEIYKIIGVNSDTRNMIELDLPDIRYKEYCELNNIKGEPRIKKTIGKKVNSIEKLTTDV |
| | | LGNVFTNTQYTKPQLLFKRGN |
| 3698 | SluCas9 | MNQKFILGLDIGITSVGYGLIDYETKNIIDAGVRLFPEANVENNEGRRSKRGSRRLKRRRIHRLE |
| | N582A | RVKKLLEDYNLLDQSQIPQSTNPYAIRVKGLSEALSKDELVIALLHIAKRRGIHKIDVIDSNDDV |
| | nickase | GNELSTKEQLNKNSKLLKDKFVCQIQLERMNEGQVRGEKNRFKTADIIKEIIQLLNVQKNFHQ |
| | | LDENFINKYIELVEMRREYFEGPGKGSPYGWEGDPKAWYETLMGHCTYFPDELRSVKYAYSA |
| | | DLFNALNDLNNLVIQRDGLSKLEYHEKYHIIENVFKQKKKPTLKQIANEINVNPEDIKGYRITKS |
| | | GKPQFTEFKLYHDLKSVLFDQSILENEDVLDQIAEILTIYQDKDSIKSKLTELDILLNEEDKENIAQ |
| | | LTGYTGTHRLSLKCIRLVLEEQWYSSRNQMEIFTHLNIKPKKINLTAANKIPKAMIDEFILSPVV |
| | | KRTFGQAINLINKIIEKYGVPEDIIIELARENNSKDKQKFINEMQKKNENTRKRINEIIGKYGNQ |
| | | NAKRLVEKIRLHDEQEGKCLYSLESIPLEDLLNNPNHYEVDHIIPRSVSFDNSYHNKVLVKQSE |
| | | ASKKSNLTPYQYFNSGKSKLSYNQFKQHILNLSKSQDRISKKKKEYLLEERDINKFEVQKEFINR |
| | | NLVDTRYATRELTNYLKAYFSANNMNVKVKTINGSFTDYLRKVWKFKKERNHGYKHHAEDA |
| | | LIIANADFLFKENKKLKAVNSVLEKPEIESKQLDIQVDSEDNYSEMFIIPKQVQDIKDFRNFKYS |
| | | HRVDKKPNRQLINDTLYSTRKKDNSTYIVQTIKDIYAKDNTTLKKQFDKSPEKFLMYQHDPRT |
| | | FEKLEVIMKQYANEKNPLAKYHEETGEYLTKYSKKNNGPIVKSLKYIGNKLGSHLDVTHQFKSS |
| | | TKKLVKLSIKPYRFDVYLTDKGYKFITISYLDVLKKDNYYYIPEQKYDKLKLGKAIDKNAKFIASFY |
| | | KNDLIKLDGEIYKIIGVNSDTRNMIELDLPDIRYKEYCELNNIKGEPRIKKTIGKKVNSIEKLTTDV |
| | | LGNVFTNTQYTKPQLLFKRGN |
| 3699 | Met(−) | NQKFILGLDIGITSVGYGLIDYETKNIIDAGVRLFPEANVENNEGRRSKRGSRRLKRRRIHRLER |
| | SluCas9 | VKKLLEDYNLLDQSQIPQSTNPYAIRVKGLSEALSKDELVIALLHIAKRRGIHKIDVIDSNDDVG |
| | nickase | NELSTKEQLNKNSKLLKDKFVCQIQLERMNEGQVRGEKNRFKTADIIKEIIQLLNVQKNFHQL |
| | | DENFINKYIELVEMRREYFEGPGKGSPYGWEGDPKAWYETLMGHCTYFPDELRSVKYAYSA |
| | | DLFNALNDLNNLVIQRDGLSKLEYHEKYHIIENVFKQKKKPTLKQIANEINVNPEDIKGYRITKS |
| | | GKPQFTEFKLYHDLKSVLFDQSILENEDVLDQIAEILTIYQDKDSIKSKLTELDILLNEEDKENIAQ |
| | | LTGYTGTHRLSLKCIRLVLEEQWYSSRNQMEIFTHLNIKPKKINLTAANKIPKAMIDEFILSPVV |
| | | KRTFGQAINLINKIIEKYGVPEDIIIELARENNSKDKQKFINEMQKKNENTRKRINEIIGKYGNQ |
| | | NAKRLVEKIRLHDEQEGKCLYSLESIPLEDLLNNPNHYEVDHIIPRSVSFDNSYHNKVLVKQSE |
| | | ASKKSNLTPYQYFNSGKSKLSYNQFKQHILNLSKSQDRISKKKKEYLLEERDINKFEVQKEFINR |
| | | NLVDTRYATRELTNYLKAYFSANNMNVKVKTINGSFTDYLRKVWKFKKERNHGYKHHAEDA |
| | | LIIANADFLFKENKKLKAVNSVLEKPEIESKQLDIQVDSEDNYSEMFIIPKQVQDIKDFRNFKYS |
| | | HRVDKKPNRQLINDTLYSTRKKDNSTYIVQTIKDIYAKDNTTLKKQFDKSPEKFLMYQHDPRT |
| | | FEKLEVIMKQYANEKNPLAKYHEETGEYLTKYSKKNNGPIVKSLKYIGNKLGSHLDVTHQFKSS |
| | | TKKLVKLSIKPYRFDVYLTDKGYKFITISYLDVLKKDNYYYIPEQKYDKLKLGKAIDKNAKFIASFY |
| | | KNDLIKLDGEIYKIIGVNSDTRNMIELDLPDIRYKEYCELNNIKGEPRIKKTIGKKVNSIEKLTTDV |
| | | LGNVFTNTQYTKPQLLFKRGN |
| 3700 | Staphylococcus | MKRNYILGLDIGITSVGYGIIDYETRDVIDAGVRLFKEANVENNEGRRSKRGARRLKRRRRHRI |
| | aureus | QRVKKLLFDYNLLTDHSELSGINPYEARVKGLSQKLSEEEFSAALLHLAKRRGVHNVNEVEEDT |
| | Cas9 (SaCas9) | GNELSTKEQISRNSKALEEKYVAELQLERLKKDGEVRGSINRFKTSDYVKEAKQLLKVQKAYHQ |
| | | LDQSFIDTYIDLLETRRTYYEGPGEGSPFGWKDIKEWYEMLMGHCTYFPEELRSVKYAYNADL |
| | | YNALNDLNNLVITRDENEKLEYYEKFQIIENVFKQKKKPTLKQIAKEILVNEEDIKGYRVTSTGK |
| | | PEFTNLKVYHDIKDITARKEIIENAELLDQIAKILTIYQSSEDIQEELTNLNSELTQEEIEQISNLKG |
| | | YTGTHNLSLKAINLILDELWHTNDNQIAIFNRLKLVPKKVDLSQQKEIPTTLVDDFILSPVVKRS |
| | | FIQSIKVINAIIKKYGLPNDIIIELAREKNSKDAQKMINEMQKRNRQTNERIEEIIRTTGKENAKY |
| | | LIEKIKLHDMQEGKCLYSLEAIPLEDLLNNPFNYEVDHIIPRSVSFDNSFNNKVLVKQEENSKKG |
| | | NRTPFQYLSSSDSKISYETFKKHILNLAKGKGRISKTKKEYLLEERDINRFSVQKDFINRNLVDTR |
| | | YATRGLMNLLRSYFRVNNLDVKVKSINGGFTSFLRRKWKFKKERNKGYKHHAEDALIIANAD |
| | | FIFKEWKKLDKAKKVMENQMFEEKQAESMPEIETEQEYKEIFITPHQIKHIKDFKDYKYSHRV |
| | | DKKPNRELINDTLYSTRKDDKGNTLIVNNLNGLYDKDNDKLKKLINKSPEKLLMYHHDPQTYQ |
| | | KLKLIMEQYGDEKNPLYKYYEETGNYLTKYSKKDNGPVIKKIKYYGNKLNAHLDITDDYPNSRN |
| | | KVVKLSLKPYRFDVYLDNGVYKFVTVKNLDVIKKENYYEVNSKCYEEAKKLKKISNQAEFIASFY |
| | | NNDLIKINGELYRVIGVNNDLLNRIEVNMIDITYREYLENMNDKRPPRIIKTIASKTQSIKKYSTD |
| | | ILGNLYEVKSKKHPQIIKKG |
| 3701 | SaCas9 | MKRNYILGLDIGITSVGYGIIDYETRDVIDAGVRLFKEANVENNEGRRSKRGARRLKRRRRHRI |
| | N580A | QRVKKLLFDYNLLTDHSELSGINPYEARVKGLSQKLSEEEFSAALLHLAKRRGVHNVNEVEEDT |
| | nickase | GNELSTKEQISRNSKALEEKYVAELQLERLKKDGEVRGSINRFKTSDYVKEAKQLLKVQKAYHQ |
| | | LDQSFIDTYIDLLETRRTYYEGPGEGSPFGWKDIKEWYEMLMGHCTYFPEELRSVKYAYNADL |
| | | YNALNDLNNLVITRDENEKLEYYEKFQIIENVFKQKKKPTLKQIAKEILVNEEDIKGYRVTSTGK |
| | | PEFTNLKVYHDIKDITARKEIIENAELLDQIAKILTIYQSSEDIQEELTNLNSELTQEEIEQISNLKG |
| | | YTGTHNLSLKAINLILDELWHTNDNQIAIFNRLKLVPKKVDLSQQKEIPTTLVDDFILSPVVKRS |
| | | FIQSIKVINAIIKKYGLPNDIIIELAREKNSKDAQKMINEMQKRNRQTNERIEEIIRTTGKENAKY |
| | | LIEKIKLHDMQEGKCLYSLEAIPLEDLLNNPFNYEVDHIIPRSVSFDNSFNNKVLVKQEEASKKG |
| | | NRTPFQYLSSSDSKISYETFKKHILNLAKGKGRISKTKKEYLLEERDINRFSVQKDFINRNLVDTR |
| | | YATRGLMNLLRSYFRVNNLDVKVKSINGGFTSFLRRKWKFKKERNKGYKHHAEDALIIANAD |
| | | FIFKEWKKLDKAKKVMENQMFEEKQAESMPEIETEQEYKEIFITPHQIKHIKDFKDYKYSHRV |
| | | DKKPNRELINDTLYSTRKDDKGNTLIVNNLNGLYDKDNDKLKKLINKSPEKLLMYHHDPQTYQ |
| | | KLKLIMEQYGDEKNPLYKYYEETGNYLTKYSKKDNGPVIKKIKYYGNKLNAHLDITDDYPNSRN |
| | | KVVKLSLKPYRFDVYLDNGVYKFVTVKNLDVIKKENYYEVNSKCYEEAKKLKKISNQAEFIASFY |
| | | NNDLIKINGELYRVIGVNNDLLNRIEVNMIDITYREYLENMNDKRPPRIIKTIASKTQSIKKYSTD |
| | | ILGNLYEVKSKKHPQIIKKG |
| 3702 | Met(−) | KRNYILGLDIGITSVGYGIIDYETRDVIDAGVRLFKEANVENNEGRRSKRGARRLKRRRRHRIQ |
| | SaCas9 | RVKKLLFDYNLLTDHSELSGINPYEARVKGLSQKLSEEEFSAALLHLAKRRGVHNVNEVEEDTG |
| | nickase | NELSTKEQISRNSKALEEKYVAELQLERLKKDGEVRGSINRFKTSDYVKEAKQLLKVQKAYHQL |
| | | DQSFIDTYIDLLETRRTYYEGPGEGSPFGWKDIKEWYEMLMGHCTYFPEELRSVKYAYNADLY |
| | | NALNDLNNLVITRDENEKLEYYEKFQIIENVFKQKKKPTLKQIAKEILVNEEDIKGYRVTSTGKP |
| | | EFTNLKVYHDIKDITARKEIIENAELLDQIAKILTIYQSSEDIQEELTNLNSELTQEEIEQISNLKGY |
| | | TGTHNLSLKAINLILDELWHTNDNQIAIFNRLKLVPKKVDLSQQKEIPTTLVDDFILSPVVKRSFI |
| | | QSIKVINAIIKKYGLPNDIIIELAREKNSKDAQKMINEMQKRNRQTNERIEEIIRTTGKENAKYLI |
| | | EKIKLHDMQEGKCLYSLEAIPLEDLLNNPFNYEVDHIIPRSVSFDNSFNNKVLVKQEEASKKGN |
| | | RTPFQYLSSSDSKISYETFKKHILNLAKGKGRISKTKKEYLLEERDINRFSVQKDFINRNLVDTRY |
| | | ATRGLMNLLRSYFRVNNLDVKVKSINGGFTSFLRRKWKFKKERNKGYKHHAEDALIIANADFI |
| | | FKEWKKLDKAKKVMENQMFEEKQAESMPEIETEQEYKEIFITPHQIKHIKDFKDYKYSHRVDK |
| | | KPNRELINDTLYSTRKDDKGNTLIVNNLNGLYDKDNDKLKKLINKSPEKLLMYHHDPQTYQKL |
| | | KLIMEQYGDEKNPLYKYYEETGNYLTKYSKKDNGPVIKKIKYYGNKLNAHLDITDDYPNSRNK |
| | | VVKLSLKPYRFDVYLDNGVYKFVTVKNLDVIKKENYYEVNSKCYEEAKKLKKISNQAEFIASFYN |
| | | NDLIKINGELYRVIGVNNDLLNRIEVNMIDITYREYLENMNDKRPPRIIKTIASKTQSIKKYSTDIL |
| | | GNLYEVKSKKHPQIIKKG |
| 3703 | SpCas9-NG | MDKKYSIGLDIGTNSVGWAVITDEYKVPSKKFKVLGNTDRHSIKKNLIGALLFDSGETAEATRL |
| | (VRVRFRR) | KRTARRRYTRRKNRICYLQEIFSNEMAKVDDSFFHRLEESFLVEEDKKHERHPIFGNIVDEVAY |
| | | HEKYPTIYHLRKKLVDSTDKADLRLIYLALAHMIKFRGHFLIEGDLNPDNSDVDKLFIQLVQTYN |
| | | QLFEENPINASGVDAKAILSARLSKSRRLENLIAQLPGEKKNGLFGNLIALSLGLTPNFKSNFDL |
| | | AEDAKLQLSKDTYDDDLDNLLAQIGDQYADLFLAAKNLSDAILLSDILRVNTEITKAPLSASMIK |
| | | RYDEHHQDLTLLKALVRQQLPEKYKEIFFDQSKNGYAGYIDGGASQEEFYKFIKPILEKMDGTE |
| | | ELLVKLNREDLLRKQRTFDNGSIPHQIHLGELHAILRRQEDFYPFLKDNREKIEKILTFRIPYYVG |
| | | PLARGNSRFAWMTRKSEETITPWNFEEVVDKGASAQSFIERMTNFDKNLPNEKVLPKHSLLY |
| | | EYFTVYNELTKVKYVTEGMRKPAFLSGEQKKAIVDLLFKTNRKVTVKQLKEDYFKKIECFDSVEI |
| | | SGVEDRFNASLGTYHDLLKIIKDKDFLDNEENEDILEDIVLTLTLFEDREMIEERLKTYAHLFDDK |
| | | VMKQLKRRRYTGWGRLSRKLINGIRDKQSGKTILDFLKSDGFANRNFMQLIHDDSLTFKEDI |
| | | QKAQVSGQGDSLHEHIANLAGSPAIKKGILQTVKVVDELVKVMGRHKPENIVIEMARENQT |
| | | TQKGQKNSRERMKRIEEGIKELGSQILKEHPVENTQLQNEKLYLYYLQNGRDMYVDQELDIN |
| | | RLSDYDVDHIVPQSFLKDDSIDNKVLTRSDKNRGKSDNVPSEEVVKKMKNYWRQLLNAKLIT |
| | | QRKFDNLTKAERGGLSELDKAGFIKRQLVETRQITKHVAQILDSRMNTKYDENDKLIREVKVIT |
| | | LKSKLVSDFRKDFQFYKVREINNYHHAHDAYLNAVVGTALIKKYPKLESEFVYGDYKVYDVRK |
| | | MIAKSEQEIGKATAKYFFYSNIMNFFKTEITLANGEIRKRPLIETNGETGEIVWDKGRDFATVR |
| | | KVLSMPQVNIVKKTEVQTGGFSKESIRPKRNSDKLIARKKDWDPKKYGGFVSPTVAYSVLVV |
| | | AKVEKGKSKKLKSVKELLGITIMERSSFEKNPIDFLEAKGYKEVKKDLIIKLPKYSLFELENGRKR |
| | | MLASARFLQKGNELALPSKYVNFLYLASHYEKLKGSPEDNEQKQLFVEQHKHYLDEIIEQISEF |
| | | SKRVILADANLDKVLSAYNKHRDKPIREQAENIIHLFTLTNLGAPRAFKYFDTTIDRKVYRSTKE |
| | | VLDATLIHQSITGLYETRIDLSQLGGD |
| 3704 | spCas9-NG | MDKKYSIGLDIGTNSVGWAVITDEYKVPSKKFKVLGNTDRHSIKKNLIGALLFDSGETAEATRL |
| | (H840A_VRVRFRR) | KRTARRRYTRRKNRICYLQEIFSNEMAKVDDSFFHRLEESFLVEEDKKHERHPIFGNIVDEVAY |
| | Nickase | HEKYPTIYHLRKKLVDSTDKADLRLIYLALAHMIKFRGHFLIEGDLNPDNSDVDKLFIQLVQTYN |
| | | QLFEENPINASGVDAKAILSARLSKSRRLENLIAQLPGEKKNGLFGNLIALSLGLTPNFKSNFDL |
| | | AEDAKLQLSKDTYDDDLDNLLAQIGDQYADLFLAAKNLSDAILLSDILRVNTEITKAPLSASMIK |
| | | RYDEHHQDLTLLKALVRQQLPEKYKEIFFDQSKNGYAGYIDGGASQEEFYKFIKPILEKMDGTE |
| | | ELLVKLNREDLLRKQRTFDNGSIPHQIHLGELHAILRRQEDFYPFLKDNREKIEKILTFRIPYYVG |
| | | PLARGNSRFAWMTRKSEETITPWNFEEVVDKGASAQSFIERMTNFDKNLPNEKVLPKHSLLY |
| | | EYFTVYNELTKVKYVTEGMRKPAFLSGEQKKAIVDLLFKTNRKVTVKQLKEDYFKKIECFDSVEI |
| | | SGVEDRFNASLGTYHDLLKIIKDKDFLDNEENEDILEDIVLTLTLFEDREMIEERLKTYAHLFDDK |
| | | VMKQLKRRRYTGWGRLSRKLINGIRDKQSGKTILDFLKSDGFANRNFMQLIHDDSLTFKEDI |
| | | QKAQVSGQGDSLHEHIANLAGSPAIKKGILQTVKVVDELVKVMGRHKPENIVIEMARENQT |
| | | TQKGQKNSRERMKRIEEGIKELGSQILKEHPVENTQLQNEKLYLYYLQNGRDMYVDQELDIN |
| | | RLSDYDVDAIVPQSFLKDDSIDNKVLTRSDKNRGKSDNVPSEEVVKKMKNYWRQLLNAKLIT |
| | | QRKFDNLTKAERGGLSELDKAGFIKRQLVETRQITKHVAQILDSRMNTKYDENDKLIREVKVIT |
| | | LKSKLVSDFRKDFQFYKVREINNYHHAHDAYLNAVVGTALIKKYPKLESEFVYGDYKVYDVRK |
| | | MIAKSEQEIGKATAKYFFYSNIMNFFKTEITLANGEIRKRPLIETNGETGEIVWDKGRDFATVR |
| | | KVLSMPQVNIVKKTEVQTGGFSKESIRPKRNSDKLIARKKDWDPKKYGGFVSPTVAYSVLVV |
| | | AKVEKGKSKKLKSVKELLGITIMERSSFEKNPIDFLEAKGYKEVKKDLIIKLPKYSLFELENGRKR |
| | | MLASARFLQKGNELALPSKYVNFLYLASHYEKLKGSPEDNEQKQLFVEQHKHYLDEIIEQISEF |
| | | SKRVILADANLDKVLSAYNKHRDKPIREQAENIIHLFTLTNLGAPRAFKYFDTTIDRKVYRSTKE |
| | | VLDATLIHQSITGLYETRIDLSQLGGD |
| 3705 | Met(−) | DKKYSIGLDIGTNSVGWAVITDEYKVPSKKFKVLGNTDRHSIKKNLIGALLFDSGETAEATRLK |
| | SpCas9-NG | RTARRRYTRRKNRICYLQEIFSNEMAKVDDSFFHRLEESFLVEEDKKHERHPIFGNIVDEVAYH |
| | Nickase | EKYPTIYHLRKKLVDSTDKADLRLIYLALAHMIKFRGHFLIEGDLNPDNSDVDKLFIQLVQTYN |
| | | QLFEENPINASGVDAKAILSARLSKSRRLENLIAQLPGEKKNGLFGNLIALSLGLTPNFKSNFDL |
| | | AEDAKLQLSKDTYDDDLDNLLAQIGDQYADLFLAAKNLSDAILLSDILRVNTEITKAPLSASMIK |
| | | RYDEHHQDLTLLKALVRQQLPEKYKEIFFDQSKNGYAGYIDGGASQEEFYKFIKPILEKMDGTE |
| | | ELLVKLNREDLLRKQRTFDNGSIPHQIHLGELHAILRRQEDFYPFLKDNREKIEKILTFRIPYYVG |
| | | PLARGNSRFAWMTRKSEETITPWNFEEVVDKGASAQSFIERMTNFDKNLPNEKVLPKHSLLY |
| | | EYFTVYNELTKVKYVTEGMRKPAFLSGEQKKAIVDLLFKTNRKVTVKQLKEDYFKKIECFDSVEI |
| | | SGVEDRFNASLGTYHDLLKIIKDKDFLDNEENEDILEDIVLTLTLFEDREMIEERLKTYAHLFDDK |
| | | VMKQLKRRRYTGWGRLSRKLINGIRDKQSGKTILDFLKSDGFANRNFMQLIHDDSLTFKEDI |
| | | QKAQVSGQGDSLHEHIANLAGSPAIKKGILQTVKVVDELVKVMGRHKPENIVIEMARENQT |
| | | TQKGQKNSRERMKRIEEGIKELGSQILKEHPVENTQLQNEKLYLYYLQNGRDMYVDQELDIN |
| | | RLSDYDVDAIVPQSFLKDDSIDNKVLTRSDKNRGKSDNVPSEEVVKKMKNYWRQLLNAKLIT |
| | | QRKFDNLTKAERGGLSELDKAGFIKRQLVETRQITKHVAQILDSRMNTKYDENDKLIREVKVIT |
| | | LKSKLVSDFRKDFQFYKVREINNYHHAHDAYLNAVVGTALIKKYPKLESEFVYGDYKVYDVRK |
| | | MIAKSEQEIGKATAKYFFYSNIMNFFKTEITLANGEIRKRPLIETNGETGEIVWDKGRDFATVR |
| | | KVLSMPQVNIVKKTEVQTGGFSKESIRPKRNSDKLIARKKDWDPKKYGGFVSPTVAYSVLVV |
| | | AKVEKGKSKKLKSVKELLGITIMERSSFEKNPIDFLEAKGYKEVKKDLIIKLPKYSLFELENGRKR |
| | | MLASARFLQKGNELALPSKYVNFLYLASHYEKLKGSPEDNEQKQLFVEQHKHYLDEIIEQISEF |
| | | SKRVILADANLDKVLSAYNKHRDKPIREQAENIIHLFTLTNLGAPRAFKYFDTTIDRKVYRSTKE |
| | | VLDATLIHQSITGLYETRIDLSQLGGD |
| 3706 | spCas9-NGA | MDKKYSIGLDIGTNSVGWAVITDEYKVPSKKFKVLGNTDRHSIKKNLIGALLFDSGETAEATRL |
| | (VRQR) | KRTARRRYTRRKNRICYLQEIFSNEMAKVDDSFFHRLEESFLVEEDKKHERHPIFGNIVDEVAY |
| | | HEKYPTIYHLRKKLVDSTDKADLRLIYLALAHMIKFRGHFLIEGDLNPDNSDVDKLFIQLVQTYN |
| | | QLFEENPINASGVDAKAILSARLSKSRRLENLIAQLPGEKKNGLFGNLIALSLGLTPNFKSNFDL |
| | | AEDAKLQLSKDTYDDDLDNLLAQIGDQYADLFLAAKNLSDAILLSDILRVNTEITKAPLSASMIK |
| | | RYDEHHQDLTLLKALVRQQLPEKYKEIFFDQSKNGYAGYIDGGASQEEFYKFIKPILEKMDGTE |
| | | ELLVKLNREDLLRKQRTFDNGSIPHQIHLGELHAILRRQEDFYPFLKDNREKIEKILTFRIPYYVG |
| | | PLARGNSRFAWMTRKSEETITPWNFEEVVDKGASAQSFIERMTNFDKNLPNEKVLPKHSLLY |
| | | EYFTVYNELTKVKYVTEGMRKPAFLSGEQKKAIVDLLFKTNRKVTVKQLKEDYFKKIECFDSVEI |
| | | SGVEDRFNASLGTYHDLLKIIKDKDFLDNEENEDILEDIVLTLTLFEDREMIEERLKTYAHLFDDK |
| | | VMKQLKRRRYTGWGRLSRKLINGIRDKQSGKTILDFLKSDGFANRNFMQLIHDDSLTFKEDI |
| | | QKAQVSGQGDSLHEHIANLAGSPAIKKGILQTVKVVDELVKVMGRHKPENIVIEMARENQT |
| | | TQKGQKNSRERMKRIEEGIKELGSQILKEHPVENTQLQNEKLYLYYLQNGRDMYVDQELDIN |
| | | RLSDYDVDHIVPQSFLKDDSIDNKVLTRSDKNRGKSDNVPSEEVVKKMKNYWRQLLNAKLIT |
| | | QRKFDNLTKAERGGLSELDKAGFIKRQLVETRQITKHVAQILDSRMNTKYDENDKLIREVKVIT |
| | | LKSKLVSDFRKDFQFYKVREINNYHHAHDAYLNAVVGTALIKKYPKLESEFVYGDYKVYDVRK |
| | | MIAKSEQEIGKATAKYFFYSNIMNFFKTEITLANGEIRKRPLIETNGETGEIVWDKGRDFATVR |
| | | KVLSMPQVNIVKKTEVQTGGFSKESILPKRNSDKLIARKKDWDPKKYGGFVSPTVAYSVLVVA |
| | | KVEKGKSKKLKSVKELLGITIMERSSFEKNPIDFLEAKGYKEVKKDLIIKLPKYSLFELENGRKRM |
| | | LASARELQKGNELALPSKYVNFLYLASHYEKLKGSPEDNEQKQLFVEQHKHYLDEIIEQISEFSK |
| | | RVILADANLDKVLSAYNKHRDKPIREQAENIIHLFTLTNLGAPAAFKYFDTTIDRKQYRSTKEVL |
| | | DATLIHQSITGLYETRIDLSQLGGD |
| 3707 | spCas9-NGA | MDKKYSIGLDIGTNSVGWAVITDEYKVPSKKFKVLGNTDRHSIKKNLIGALLFDSGETAEATRL |
| | (H840A_VRQR) | KRTARRRYTRRKNRICYLQEIFSNEMAKVDDSFFHRLEESFLVEEDKKHERHPIFGNIVDEVAY |
| | Nickase | HEKYPTIYHLRKKLVDSTDKADLRLIYLALAHMIKFRGHFLIEGDLNPDNSDVDKLFIQLVQTYN |
| | | QLFEENPINASGVDAKAILSARLSKSRRLENLIAQLPGEKKNGLFGNLIALSLGLTPNFKSNFDL |
| | | AEDAKLQLSKDTYDDDLDNLLAQIGDQYADLFLAAKNLSDAILLSDILRVNTEITKAPLSASMIK |
| | | RYDEHHQDLTLLKALVRQQLPEKYKEIFFDQSKNGYAGYIDGGASQEEFYKFIKPILEKMDGTE |
| | | ELLVKLNREDLLRKQRTFDNGSIPHQIHLGELHAILRRQEDFYPFLKDNREKIEKILTFRIPYYVG |
| | | PLARGNSRFAWMTRKSEETITPWNFEEVVDKGASAQSFIERMTNFDKNLPNEKVLPKHSLLY |
| | | EYFTVYNELTKVKYVTEGMRKPAFLSGEQKKAIVDLLFKTNRKVTVKQLKEDYFKKIECFDSVEI |
| | | SGVEDRFNASLGTYHDLLKIIKDKDFLDNEENEDILEDIVLTLTLFEDREMIEERLKTYAHLFDDK |
| | | VMKQLKRRRYTGWGRLSRKLINGIRDKQSGKTILDFLKSDGFANRNFMQLIHDDSLTFKEDI |
| | | QKAQVSGQGDSLHEHIANLAGSPAIKKGILQTVKVVDELVKVMGRHKPENIVIEMARENQT |
| | | TQKGQKNSRERMKRIEEGIKELGSQILKEHPVENTQLQNEKLYLYYLQNGRDMYVDQELDIN |
| | | RLSDYDVDAIVPQSFLKDDSIDNKVLTRSDKNRGKSDNVPSEEVVKKMKNYWRQLLNAKLIT |
| | | QRKFDNLTKAERGGLSELDKAGFIKRQLVETRQITKHVAQILDSRMNTKYDENDKLIREVKVIT |
| | | LKSKLVSDFRKDFQFYKVREINNYHHAHDAYLNAVVGTALIKKYPKLESEFVYGDYKVYDVRK |
| | | MIAKSEQEIGKATAKYFFYSNIMNFFKTEITLANGEIRKRPLIETNGETGEIVWDKGRDFATVR |
| | | KVLSMPQVNIVKKTEVQTGGFSKESILPKRNSDKLIARKKDWDPKKYGGFVSPTVAYSVLVVA |
| | | KVEKGKSKKLKSVKELLGITIMERSSFEKNPIDFLEAKGYKEVKKDLIIKLPKYSLFELENGRKRM |
| | | LASARELQKGNELALPSKYVNFLYLASHYEKLKGSPEDNEQKQLFVEQHKHYLDEIIEQISEFSK |
| | | RVILADANLDKVLSAYNKHRDKPIREQAENIIHLFTLTNLGAPAAFKYFDTTIDRKQYRSTKEVL |
| | | DATLIHQSITGLYETRIDLSQLGGD |
| 3708 | Met(−) | DKKYSIGLDIGTNSVGWAVITDEYKVPSKKFKVLGNTDRHSIKKNLIGALLFDSGETAEATRLK |
| | spCas9-NGA | RTARRRYTRRKNRICYLQEIFSNEMAKVDDSFFHRLEESFLVEEDKKHERHPIFGNIVDEVAYH |
| | Nickase | EKYPTIYHLRKKLVDSTDKADLRLIYLALAHMIKFRGHFLIEGDLNPDNSDVDKLFIQLVQTYN |
| | | QLFEENPINASGVDAKAILSARLSKSRRLENLIAQLPGEKKNGLFGNLIALSLGLTPNFKSNFDL |
| | | AEDAKLQLSKDTYDDDLDNLLAQIGDQYADLFLAAKNLSDAILLSDILRVNTEITKAPLSASMIK |
| | | RYDEHHQDLTLLKALVRQQLPEKYKEIFFDQSKNGYAGYIDGGASQEEFYKFIKPILEKMDGTE |
| | | ELLVKLNREDLLRKQRTFDNGSIPHQIHLGELHAILRRQEDFYPFLKDNREKIEKILTFRIPYYVG |
| | | PLARGNSRFAWMTRKSEETITPWNFEEVVDKGASAQSFIERMTNFDKNLPNEKVLPKHSLLY |
| | | EYFTVYNELTKVKYVTEGMRKPAFLSGEQKKAIVDLLFKTNRKVTVKQLKEDYFKKIECFDSVEI |
| | | SGVEDRFNASLGTYHDLLKIIKDKDFLDNEENEDILEDIVLTLTLFEDREMIEERLKTYAHLFDDK |
| | | VMKQLKRRRYTGWGRLSRKLINGIRDKQSGKTILDFLKSDGFANRNFMQLIHDDSLTFKEDI |
| | | QKAQVSGQGDSLHEHIANLAGSPAIKKGILQTVKVVDELVKVMGRHKPENIVIEMARENQT |
| | | TQKGQKNSRERMKRIEEGIKELGSQILKEHPVENTQLQNEKLYLYYLQNGRDMYVDQELDIN |
| | | RLSDYDVDAIVPQSFLKDDSIDNKVLTRSDKNRGKSDNVPSEEVVKKMKNYWRQLLNAKLIT |
| | | QRKFDNLTKAERGGLSELDKAGFIKRQLVETRQITKHVAQILDSRMNTKYDENDKLIREVKVIT |
| | | LKSKLVSDFRKDFQFYKVREINNYHHAHDAYLNAVVGTALIKKYPKLESEFVYGDYKVYDVRK |
| | | MIAKSEQEIGKATAKYFFYSNIMNFFKTEITLANGEIRKRPLIETNGETGEIVWDKGRDFATVR |
| | | KVLSMPQVNIVKKTEVQTGGFSKESILPKRNSDKLIARKKDWDPKKYGGFVSPTVAYSVLVVA |
| | | KVEKGKSKKLKSVKELLGITIMERSSFEKNPIDFLEAKGYKEVKKDLIIKLPKYSLFELENGRKRM |
| | | LASARELQKGNELALPSKYVNFLYLASHYEKLKGSPEDNEQKQLFVEQHKHYLDEIIEQISEFSK |
| | | RVILADANLDKVLSAYNKHRDKPIREQAENIIHLFTLTNLGAPAAFKYFDTTIDRKQYRSTKEVL |
| | | DATLIHQSITGLYETRIDLSQLGGD |
| 3709 | SpRY Cas9 | MDKKYSIGLDIGTNSVGWAVITDEYKVPSKKFKVLGNTDRHSIKKNLIGALLFDSGETAERTRL |
| | | KRTARRRYTRRKNRICYLQEIFSNEMAKVDDSFFHRLEESFLVEEDKKHERHPIFGNIVDEVAY |
| | | HEKYPTIYHLRKKLVDSTDKADLRLIYLALAHMIKFRGHFLIEGDLNPDNSDVDKLFIQLVQTYN |
| | | QLFEENPINASGVDAKAILSARLSKSRRLENLIAQLPGEKKNGLFGNLIALSLGLTPNFKSNFDL |
| | | AEDAKLQLSKDTYDDDLDNLLAQIGDQYADLFLAAKNLSDAILLSDILRVNTEITKAPLSASMIK |
| | | RYDEHHQDLTLLKALVRQQLPEKYKEIFFDQSKNGYAGYIDGGASQEEFYKFIKPILEKMDGTE |
| | | ELLVKLNREDLLRKQRTFDNGSIPHQIHLGELHAILRRQEDFYPFLKDNREKIEKILTFRIPYYVG |
| | | PLARGNSRFAWMTRKSEETITPWNFEEVVDKGASAQSFIERMTNFDKNLPNEKVLPKHSLLY |
| | | EYFTVYNELTKVKYVTEGMRKPAFLSGEQKKAIVDLLFKTNRKVTVKQLKEDYFKKIECFDSVEI |
| | | SGVEDRFNASLGTYHDLLKIIKDKDFLDNEENEDILEDIVLTLTLFEDREMIEERLKTYAHLFDDK |
| | | VMKQLKRRRYTGWGRLSRKLINGIRDKQSGKTILDFLKSDGFANRNFMQLIHDDSLTFKEDI |
| | | QKAQVSGQGDSLHEHIANLAGSPAIKKGILQTVKVVDELVKVMGRHKPENIVIEMARENQT |
| | | TQKGQKNSRERMKRIEEGIKELGSQILKEHPVENTQLQNEKLYLYYLQNGRDMYVDQELDIN |
| | | RLSDYDVDHIVPQSFLKDDSIDNKVLTRSDKNRGKSDNVPSEEVVKKMKNYWRQLLNAKLIT |
| | | QRKFDNLTKAERGGLSELDKAGFIKRQLVETRQITKHVAQILDSRMNTKYDENDKLIREVKVIT |
| | | LKSKLVSDFRKDFQFYKVREINNYHHAHDAYLNAVVGTALIKKYPKLESEFVYGDYKVYDVRK |
| | | MIAKSEQEIGKATAKYFFYSNIMNFFKTEITLANGEIRKRPLIETNGETGEIVWDKGRDFATVR |
| | | KVLSMPQVNIVKKTEVQTGGFSKESIRPKRNSDKLIARKKDWDPKKYGGFLWPTVAYSVLVV |
| | | AKVEKGKSKKLKSVKELLGITIMERSSFEKNPIDFLEAKGYKEVKKDLIIKLPKYSLFELENGRKR |
| | | MLASAKQLQKGNELALPSKYVNFLYLASHYEKLKGSPEDNEQKQLFVEQHKHYLDEIIEQISEF |
| | | SKRVILADANLDKVLSAYNKHRDKPIREQAENIIHLFTLTRLGAPRAFKYFDTTIDPKQYRSTKE |
| | | VLDATLIHQSITGLYETRIDLSQLGGD |
| 3710 | SpRY Cas9 | MDKKYSIGLDIGTNSVGWAVITDEYKVPSKKFKVLGNTDRHSIKKNLIGALLFDSGETAERTRL |
| | (H840A) | KRTARRRYTRRKNRICYLQEIFSNEMAKVDDSFFHRLEESFLVEEDKKHERHPIFGNIVDEVAY |
| | Nickase | HEKYPTIYHLRKKLVDSTDKADLRLIYLALAHMIKFRGHFLIEGDLNPDNSDVDKLFIQLVQTYN |
| | | QLFEENPINASGVDAKAILSARLSKSRRLENLIAQLPGEKKNGLFGNLIALSLGLTPNFKSNFDL |
| | | AEDAKLQLSKDTYDDDLDNLLAQIGDQYADLFLAAKNLSDAILLSDILRVNTEITKAPLSASMIK |
| | | RYDEHHQDLTLLKALVRQQLPEKYKEIFFDQSKNGYAGYIDGGASQEEFYKFIKPILEKMDGTE |
| | | ELLVKLNREDLLRKQRTFDNGSIPHQIHLGELHAILRRQEDFYPFLKDNREKIEKILTFRIPYYVG |
| | | PLARGNSRFAWMTRKSEETITPWNFEEVVDKGASAQSFIERMTNFDKNLPNEKVLPKHSLLY |
| | | EYFTVYNELTKVKYVTEGMRKPAFLSGEQKKAIVDLLFKTNRKVTVKQLKEDYFKKIECFDSVEI |
| | | SGVEDRFNASLGTYHDLLKIIKDKDFLDNEENEDILEDIVLTLTLFEDREMIEERLKTYAHLFDDK |
| | | VMKQLKRRRYTGWGRLSRKLINGIRDKQSGKTILDFLKSDGFANRNFMQLIHDDSLTFKEDI |
| | | QKAQVSGQGDSLHEHIANLAGSPAIKKGILQTVKVVDELVKVMGRHKPENIVIEMARENQT |
| | | TQKGQKNSRERMKRIEEGIKELGSQILKEHPVENTQLQNEKLYLYYLQNGRDMYVDQELDIN |
| | | RLSDYDVDAIVPQSFLKDDSIDNKVLTRSDKNRGKSDNVPSEEVVKKMKNYWRQLLNAKLIT |
| | | QRKFDNLTKAERGGLSELDKAGFIKRQLVETRQITKHVAQILDSRMNTKYDENDKLIREVKVIT |
| | | LKSKLVSDFRKDFQFYKVREINNYHHAHDAYLNAVVGTALIKKYPKLESEFVYGDYKVYDVRK |
| | | MIAKSEQEIGKATAKYFFYSNIMNFFKTEITLANGEIRKRPLIETNGETGEIVWDKGRDFATVR |
| | | KVLSMPQVNIVKKTEVQTGGFSKESIRPKRNSDKLIARKKDWDPKKYGGFLWPTVAYSVLVV |
| | | AKVEKGKSKKLKSVKELLGITIMERSSFEKNPIDFLEAKGYKEVKKDLIIKLPKYSLFELENGRKR |
| | | MLASAKQLQKGNELALPSKYVNFLYLASHYEKLKGSPEDNEQKQLFVEQHKHYLDEIIEQISEF |
| | | SKRVILADANLDKVLSAYNKHRDKPIREQAENIIHLFTLTRLGAPRAFKYFDTTIDPKQYRSTKE |
| | | VLDATLIHQSITGLYETRIDLSQLGGD |
| 3711 | Met(−) | DKKYSIGLDIGTNSVGWAVITDEYKVPSKKFKVLGNTDRHSIKKNLIGALLFDSGETAERTRLKR |
| | SpRY | TARRRYTRRKNRICYLQEIFSNEMAKVDDSFFHRLEESFLVEEDKKHERHPIFGNIVDEVAYHE |
| | Cas9 Nickase | KYPTIYHLRKKLVDSTDKADLRLIYLALAHMIKFRGHFLIEGDLNPDNSDVDKLFIQLVQTYNQL |
| | | FEENPINASGVDAKAILSARLSKSRRLENLIAQLPGEKKNGLFGNLIALSLGLTPNFKSNFDLAE |
| | | DAKLQLSKDTYDDDLDNLLAQIGDQYADLFLAAKNLSDAILLSDILRVNTEITKAPLSASMIKRY |
| | | DEHHQDLTLLKALVRQQLPEKYKEIFFDQSKNGYAGYIDGGASQEEFYKFIKPILEKMDGTEEL |
| | | LVKLNREDLLRKQRTFDNGSIPHQIHLGELHAILRRQEDFYPFLKDNREKIEKILTFRIPYYVGPL |
| | | ARGNSRFAWMTRKSEETITPWNFEEVVDKGASAQSFIERMTNFDKNLPNEKVLPKHSLLYEY |
| | | FTVYNELTKVKYVTEGMRKPAFLSGEQKKAIVDLLFKTNRKVTVKQLKEDYFKKIECFDSVEIS |
| | | GVEDRFNASLGTYHDLLKIIKDKDFLDNEENEDILEDIVLTLTLFEDREMIEERLKTYAHLFDDK |
| | | VMKQLKRRRYTGWGRLSRKLINGIRDKQSGKTILDFLKSDGFANRNFMQLIHDDSLTFKEDI |
| | | QKAQVSGQGDSLHEHIANLAGSPAIKKGILQTVKVVDELVKVMGRHKPENIVIEMARENQT |
| | | TQKGQKNSRERMKRIEEGIKELGSQILKEHPVENTQLQNEKLYLYYLQNGRDMYVDQELDIN |
| | | RLSDYDVDAIVPQSFLKDDSIDNKVLTRSDKNRGKSDNVPSEEVVKKMKNYWRQLLNAKLIT |
| | | QRKFDNLTKAERGGLSELDKAGFIKRQLVETRQITKHVAQILDSRMNTKYDENDKLIREVKVIT |
| | | LKSKLVSDFRKDFQFYKVREINNYHHAHDAYLNAVVGTALIKKYPKLESEFVYGDYKVYDVRK |
| | | MIAKSEQEIGKATAKYFFYSNIMNFFKTEITLANGEIRKRPLIETNGETGEIVWDKGRDFATVR |
| | | KVLSMPQVNIVKKTEVQTGGFSKESIRPKRNSDKLIARKKDWDPKKYGGFLWPTVAYSVLVV |
| | | AKVEKGKSKKLKSVKELLGITIMERSSFEKNPIDFLEAKGYKEVKKDLIIKLPKYSLFELENGRKR |
| | | MLASAKQLQKGNELALPSKYVNFLYLASHYEKLKGSPEDNEQKQLFVEQHKHYLDEIIEQISEF |
| | | SKRVILADANLDKVLSAYNKHRDKPIREQAENIIHLFTLTRLGAPRAFKYFDTTIDPKQYRSTKE |
| | | VLDATLIHQSITGLYETRIDLSQLGGD |
| 3712 | SRGN3.1 | MNQKFILGLDIGITSVGYGLIDYETKNIIDAGVRLFPEANVENNEGRRSKRGSRRLKRRRIHRLE |
| | | RVKLLLTEYDLINKEQIPTSNNPYQIRVKGLSEILSKDELAIALLHLAKRRGIHNVDVAADKEETA |
| | | SDSLSTKDQINKNAKFLESRYVCELQKERLENEGHVRGVENRFLTKDIVREAKKIIDTQMQYYP |
| | | EIDETFKEKYISLVETRREYFEGPGQGSPFGWNGDLKKWYEMLMGHCTYFPQELRSVKYAYS |
| | | ADLFNALNDLNNLIIQRDNSEKLEYHEKYHIIENVFKQKKKPTLKQIAKEIGVNPEDIKGYRITKS |
| | | GTPEFTSFKLFHDLKKVVKDHAILDDIDLLNQIAEILTIYQDKDSIVAELGQLEYLMSEADKQSIS |
| | | ELTGYTGTHSLSLKCMNMIIDELWHSSMNQMEVFTYLNMRPKKYELKGYQRIPTDMIDDAI |
| | | LSPVVKRTFIQSINVINKVIEKYGIPEDIIIELARENNSDDRKKFINNLQKKNEATRKRINEIIGQT |
| | | GNQNAKRIVEKIRLHDQQEGKCLYSLESIPLEDLLNNPNHYEVDHIIPRSVSFDNSYHNKVLVK |
| | | QSENSKKSNLTPYQYFNSGKSKLSYNQFKQHILNLSKSQDRISKKKKEYLLEERDINKFEVQKEF |
| | | INRNLVDTRYATRELTNYLKAYFSANNMNVKVKTINGSFTDYLRKVWKFKKERNHGYKHHAE |
| | | DALIIANADFLFKENKKLKAVNSVLEKPEIETKQLDIQVDSEDNYSEMFIIPKQVQDIKDFRNFK |
| | | YSHRVDKKPNRQLINDTLYSTRKKDNSTYIVQTIKDIYAKDNTTLKKQFDKSPEKFLMYQHDP |
| | | RTFEKLEVIMKQYANEKNPLAKYHEETGEYLTKYSKKNNGPIVKSLKYIGNKLGSHLDVTHQFK |
| | | SSTKKLVKLSIKNYRFDVYLTEKGYKFVTIAYLNVFKKDNYYYIPKDKYQELKEKKKIKDTDQFIA |
| | | SFYKNDLIKLNGDLYKIIGVNSDDRNIIELDYYDIKYKDYCEINNIKGEPRIKKTIGKKTESIEKFTT |
| | | DVLGNLYLHSTEKAPQLIFKRGL |
| 3713 | SRGN3.1 | MNQKFILGLDIGITSVGYGLIDYETKNIIDAGVRLFPEANVENNEGRRSKRGSRRLKRRRIHRLE |
| | (N585A) | RVKLLLTEYDLINKEQIPTSNNPYQIRVKGLSEILSKDELAIALLHLAKRRGIHNVDVAADKEETA |
| | Nickase | SDSLSTKDQINKNAKFLESRYVCELQKERLENEGHVRGVENRFLTKDIVREAKKIIDTQMQYYP |
| | | EIDETFKEKYISLVETRREYFEGPGQGSPFGWNGDLKKWYEMLMGHCTYFPQELRSVKYAYS |
| | | ADLFNALNDLNNLIIQRDNSEKLEYHEKYHIIENVFKQKKKPTLKQIAKEIGVNPEDIKGYRITKS |
| | | GTPEFTSFKLFHDLKKVVKDHAILDDIDLLNQIAEILTIYQDKDSIVAELGQLEYLMSEADKQSIS |
| | | ELTGYTGTHSLSLKCMNMIIDELWHSSMNQMEVFTYLNMRPKKYELKGYQRIPTDMIDDAI |
| | | LSPVVKRTFIQSINVINKVIEKYGIPEDIIIELARENNSDDRKKFINNLQKKNEATRKRINEIIGQT |
| | | GNQNAKRIVEKIRLHDQQEGKCLYSLESIPLEDLLNNPNHYEVDHIIPRSVSFDNSYHNKVLVK |
| | | QSEASKKSNLTPYQYFNSGKSKLSYNQFKQHILNLSKSQDRISKKKKEYLLEERDINKFEVQKEF |
| | | INRNLVDTRYATRELTNYLKAYFSANNMNVKVKTINGSFTDYLRKVWKFKKERNHGYKHHAE |
| | | DALIIANADFLFKENKKLKAVNSVLEKPEIETKQLDIQVDSEDNYSEMFIIPKQVQDIKDFRNFK |
| | | YSHRVDKKPNRQLINDTLYSTRKKDNSTYIVQTIKDIYAKDNTTLKKQFDKSPEKFLMYQHDP |
| | | RTFEKLEVIMKQYANEKNPLAKYHEETGEYLTKYSKKNNGPIVKSLKYIGNKLGSHLDVTHQFK |
| | | SSTKKLVKLSIKNYRFDVYLTEKGYKFVTIAYLNVFKKDNYYYIPKDKYQELKEKKKIKDTDQFIA |
| | | SFYKNDLIKLNGDLYKIIGVNSDDRNIIELDYYDIKYKDYCEINNIKGEPRIKKTIGKKTESIEKFTT |
| | | DVLGNLYLHSTEKAPQLIFKRGL |
| 3714 | Met(−) | NQKFILGLDIGITSVGYGLIDYETKNIIDAGVRLFPEANVENNEGRRSKRGSRRLKRRRIHRLER |
| | sRGN3.1 | VKLLLTEYDLINKEQIPTSNNPYQIRVKGLSEILSKDELAIALLHLAKRRGIHNVDVAADKEETAS |
| | (N584A) | DSLSTKDQINKNAKFLESRYVCELQKERLENEGHVRGVENRFLTKDIVREAKKIIDTQMQYYPE |
| | Nickase | IDETFKEKYISLVETRREYFEGPGQGSPFGWNGDLKKWYEMLMGHCTYFPQELRSVKYAYSA |
| | | DLFNALNDLNNLIIQRDNSEKLEYHEKYHIIENVFKQKKKPTLKQIAKEIGVNPEDIKGYRITKSG |
| | | TPEFTSFKLFHDLKKVVKDHAILDDIDLLNQIAEILTIYQDKDSIVAELGQLEYLMSEADKQSISE |
| | | LTGYTGTHSLSLKCMNMIIDELWHSSMNQMEVFTYLNMRPKKYELKGYQRIPTDMIDDAIL |
| | | SPVVKRTFIQSINVINKVIEKYGIPEDIIIELARENNSDDRKKFINNLQKKNEATRKRINEIIGQTG |
| | | NQNAKRIVEKIRLHDQQEGKCLYSLESIPLEDLLNNPNHYEVDHIIPRSVSFDNSYHNKVLVKQ |
| | | SEASKKSNLTPYQYFNSGKSKLSYNQFKQHILNLSKSQDRISKKKKEYLLEERDINKFEVQKEFI |
| | | NRNLVDTRYATRELTNYLKAYFSANNMNVKVKTINGSFTDYLRKVWKFKKERNHGYKHHAE |
| | | DALIIANADFLFKENKKLKAVNSVLEKPEIETKQLDIQVDSEDNYSEMFIIPKQVQDIKDERNFK |
| | | YSHRVDKKPNRQLINDTLYSTRKKDNSTYIVQTIKDIYAKDNTTLKKQFDKSPEKFLMYQHDP |
| | | RTFEKLEVIMKQYANEKNPLAKYHEETGEYLTKYSKKNNGPIVKSLKYIGNKLGSHLDVTHQFK |
| | | SSTKKLVKLSIKNYRFDVYLTEKGYKFVTIAYLNVFKKDNYYYIPKDKYQELKEKKKIKDTDQFIA |
| | | SFYKNDLIKLNGDLYKIIGVNSDDRNIIELDYYDIKYKDYCEINNIKGEPRIKKTIGKKTESIEKFTT |
| | | DVLGNLYLHSTEKAPQLIFKRGL |
| 3715 | sRGN3.3 | MNQKFILGLDIGITSVGYGLIDYETKNIIDAGVRLFPEANVENNEGRRSKRGSRRLKRRRIHRLE |
| | | RVKLLLTEYDLINKEQIPTSNNPYQIRVKGLSEILSKDELAIALLHLAKRRGIHNVDVAADKEETA |
| | | SDSLSTKDQINKNAKFLESRYVCELQKERLENEGHVRGVENRFLTKDIVREAKKIIDTQMQYYP |
| | | EIDETFKEKYISLVETRREYFEGPGQGSPFGWNGDLKKWYEMLMGHCTYFPQELRSVKYAYS |
| | | ADLFNALNDLNNLIIQRDNSEKLEYHEKYHIIENVFKQKKKPTLKQIAKEIGVNPEDIKGYRITKS |
| | | GTPEFTSFKLFHDLKKVVKDHAILDDIDLLNQIAEILTIYQDKDSIVAELGQLEYLMSEADKQSIS |
| | | ELTGYTGTHSLSLKCMNMIIDELWHSSMNQMEVFTYLNMRPKKYELKGYQRIPTDMIDDAI |
| | | LSPVVKRTFIQSINVINKVIEKYGIPEDIIIELARENNSDDRKKFINNLQKKNEATRKRINEIIGQT |
| | | GNQNAKRIVEKIRLHDQQEGKCLYSLESIPLEDLLNNPNHYEVDHIIPRSVSFDNSYHNKVLVK |
| | | QSENSKKSNLTPYQYFNSGKSKLSYNQFKQHILNLSKSQDRISKKKKEYLLEERDINKFEVQKEF |
| | | INRNLVDTRYATRELTSYLKAYFSANNMDVKVKTINGSFTNHLRKVWRFDKYRNHGYKHHA |
| | | EDALIIANADFLFKENKKLQNTNKILEKPTIENNTKKVTVEKEEDYNNVFETPKLVEDIKQYRDY |
| | | KFSHRVDKKPNRQLINDTLYSTRMKDEHDYIVQTITDIYGKDNTNLKKQFNKNPEKFLMYQN |
| | | DPKTFEKLSIIMKQYSDEKNPLAKYYEETGEYLTKYSKKNNGPIVKKIKLLGNKVGNHLDVTNK |
| | | YENSTKKLVKLSIKNYRFDVYLTEKGYKFVTIAYLNVFKKDNYYYIPKDKYQELKEKKKIKDTDQF |
| | | IASFYKNDLIKLNGDLYKIIGVNSDDRNIIELDYYDIKYKDYCEINNIKGEPRIKKTIGKKTESIEKFT |
| | | TDVLGNLYLHSTEKAPQLIFKRGL |
| 3716 | SRGN3.3 | MNQKFILGLDIGITSVGYGLIDYETKNIIDAGVRLFPEANVENNEGRRSKRGSRRLKRRRIHRLE |
| | (N585A) | RVKLLLTEYDLINKEQIPTSNNPYQIRVKGLSEILSKDELAIALLHLAKRRGIHNVDVAADKEETA |
| | Nickase | SDSLSTKDQINKNAKFLESRYVCELQKERLENEGHVRGVENRFLTKDIVREAKKIIDTQMQYYP |
| | | EIDETFKEKYISLVETRREYFEGPGQGSPFGWNGDLKKWYEMLMGHCTYFPQELRSVKYAYS |
| | | ADLFNALNDLNNLIIQRDNSEKLEYHEKYHIIENVFKQKKKPTLKQIAKEIGVNPEDIKGYRITKS |
| | | GTPEFTSFKLFHDLKKVVKDHAILDDIDLLNQIAEILTIYQDKDSIVAELGQLEYLMSEADKQSIS |
| | | ELTGYTGTHSLSLKCMNMIIDELWHSSMNQMEVFTYLNMRPKKYELKGYQRIPTDMIDDAI |
| | | LSPVVKRTFIQSINVINKVIEKYGIPEDIIIELARENNSDDRKKFINNLQKKNEATRKRINEIIGQT |
| | | GNQNAKRIVEKIRLHDQQEGKCLYSLESIPLEDLLNNPNHYEVDHIIPRSVSFDNSYHNKVLVK |
| | | QSEASKKSNLTPYQYFNSGKSKLSYNQFKQHILNLSKSQDRISKKKKEYLLEERDINKFEVQKEF |
| | | INRNLVDTRYATRELTSYLKAYFSANNMDVKVKTINGSFTNHLRKVWRFDKYRNHGYKHHA |
| | | EDALIIANADFLFKENKKLQNTNKILEKPTIENNTKKVTVEKEEDYNNVFETPKLVEDIKQYRDY |
| | | KFSHRVDKKPNRQLINDTLYSTRMKDEHDYIVQTITDIYGKDNTNLKKQFNKNPEKFLMYQN |
| | | DPKTFEKLSIIMKQYSDEKNPLAKYYEETGEYLTKYSKKNNGPIVKKIKLLGNKVGNHLDVTNK |
| | | YENSTKKLVKLSIKNYRFDVYLTEKGYKFVTIAYLNVFKKDNYYYIPKDKYQELKEKKKIKDTDQF |
| | | IASFYKNDLIKLNGDLYKIIGVNSDDRNIIELDYYDIKYKDYCEINNIKGEPRIKKTIGKKTESIEKFT |
| | | TDVLGNLYLHSTEKAPQLIFKRGL |
| 3717 | Met(−) | NQKFILGLDIGITSVGYGLIDYETKNIIDAGVRLFPEANVENNEGRRSKRGSRRLKRRRIHRLER |
| | SRGN3.3 | VKLLLTEYDLINKEQIPTSNNPYQIRVKGLSEILSKDELAIALLHLAKRRGIHNVDVAADKEETAS |
| | (N584A) | DSLSTKDQINKNAKFLESRYVCELQKERLENEGHVRGVENRFLTKDIVREAKKIIDTQMQYYPE |
| | Nickase | IDETFKEKYISLVETRREYFEGPGQGSPFGWNGDLKKWYEMLMGHCTYFPQELRSVKYAYSA |
| | | DLFNALNDLNNLIIQRDNSEKLEYHEKYHIIENVFKQKKKPTLKQIAKEIGVNPEDIKGYRITKSG |
| | | TPEFTSFKLFHDLKKVVKDHAILDDIDLLNQIAEILTIYQDKDSIVAELGQLEYLMSEADKQSISE |
| | | LTGYTGTHSLSLKCMNMIIDELWHSSMNQMEVFTYLNMRPKKYELKGYQRIPTDMIDDAIL |
| | | SPVVKRTFIQSINVINKVIEKYGIPEDIIIELARENNSDDRKKFINNLQKKNEATRKRINEIIGQTG |
| | | NQNAKRIVEKIRLHDQQEGKCLYSLESIPLEDLLNNPNHYEVDHIIPRSVSFDNSYHNKVLVKQ |
| | | SEASKKSNLTPYQYFNSGKSKLSYNQFKQHILNLSKSQDRISKKKKEYLLEERDINKFEVQKEFI |
| | | NRNLVDTRYATRELTSYLKAYFSANNMDVKVKTINGSFTNHLRKVWRFDKYRNHGYKHHAE |
| | | DALIIANADFLFKENKKLQNTNKILEKPTIENNTKKVTVEKEEDYNNVFETPKLVEDIKQYRDYK |
| | | FSHRVDKKPNRQLINDTLYSTRMKDEHDYIVQTITDIYGKDNTNLKKQFNKNPEKFLMYQND |
| | | PKTFEKLSIIMKQYSDEKNPLAKYYEETGEYLTKYSKKNNGPIVKKIKLLGNKVGNHLDVTNKYE |
| | | NSTKKLVKLSIKNYRFDVYLTEKGYKFVTIAYLNVFKKDNYYYIPKDKYQELKEKKKIKDTDQFIA |
| | | SFYKNDLIKLNGDLYKIIGVNSDDRNIIELDYYDIKYKDYCEINNIKGEPRIKKTIGKKTESIEKFTT |
| | | DVLGNLYLHSTEKAPQLIFKRGL |
| 3718 | SpG | MDKKYSIGLDIGTNSVGWAVITDEYKVPSKKFKVLGNTDRHSIKKNLIGALLFDSGETAEATRL |
| | | KRTARRRYTRRKNRICYLQEIFSNEMAKVDDSFFHRLEESFLVEEDKKHERHPIFGNIVDEVAY |
| | | HEKYPTIYHLRKKLVDSTDKADLRLIYLALAHMIKFRGHFLIEGDLNPDNSDVDKLFIQLVQTYN |
| | | QLFEENPINASGVDAKAILSARLSKSRRLENLIAQLPGEKKNGLFGNLIALSLGLTPNFKSNFDL |
| | | AEDAKLQLSKDTYDDDLDNLLAQIGDQYADLFLAAKNLSDAILLSDILRVNTEITKAPLSASMIK |
| | | RYDEHHQDLTLLKALVRQQLPEKYKEIFFDQSKNGYAGYIDGGASQEEFYKFIKPILEKMDGTE |
| | | ELLVKLNREDLLRKQRTFDNGSIPHQIHLGELHAILRRQEDFYPFLKDNREKIEKILTFRIPYYVG |
| | | PLARGNSRFAWMTRKSEETITPWNFEEVVDKGASAQSFIERMTNFDKNLPNEKVLPKHSLLY |
| | | EYFTVYNELTKVKYVTEGMRKPAFLSGEQKKAIVDLLFKTNRKVTVKQLKEDYFKKIECFDSVEI |
| | | SGVEDRFNASLGTYHDLLKIIKDKDFLDNEENEDILEDIVLTLTLFEDREMIEERLKTYAHLFDDK |
| | | VMKQLKRRRYTGWGRLSRKLINGIRDKQSGKTILDFLKSDGFANRNFMQLIHDDSLTFKEDI |
| | | QKAQVSGQGDSLHEHIANLAGSPAIKKGILQTVKVVDELVKVMGRHKPENIVIEMARENQT |
| | | TQKGQKNSRERMKRIEEGIKELGSQILKEHPVENTQLQNEKLYLYYLQNGRDMYVDQELDIN |
| | | RLSDYDVDHIVPQSFLKDDSIDNKVLTRSDKNRGKSDNVPSEEVVKKMKNYWRQLLNAKLIT |
| | | QRKFDNLTKAERGGLSELDKAGFIKRQLVETRQITKHVAQILDSRMNTKYDENDKLIREVKVIT |
| | | LKSKLVSDFRKDFQFYKVREINNYHHAHDAYLNAVVGTALIKKYPKLESEFVYGDYKVYDVRK |
| | | MIAKSEQEIGKATAKYFFYSNIMNFFKTEITLANGEIRKRPLIETNGETGEIVWDKGRDFATVR |
| | | KVLSMPQVNIVKKTEVQTGGFSKESILPKRNSDKLIARKKDWDPKKYGGFLWPTVAYSVLVV |
| | | AKVEKGKSKKLKSVKELLGITIMERSSFEKNPIDFLEAKGYKEVKKDLIIKLPKYSLFELENGRKR |
| | | MLASAKQLQKGNELALPSKYVNFLYLASHYEKLKGSPEDNEQKQLFVEQHKHYLDEIIEQISEF |
| | | SKRVILADANLDKVLSAYNKHRDKPIREQAENIIHLFTLTNLGAPAAFKYFDTTIDRKQYRSTKE |
| | | VLDATLIHQSITGLYETRIDLSQLGGD |
| 3719 | SpG(H840A) | MDKKYSIGLDIGTNSVGWAVITDEYKVPSKKFKVLGNTDRHSIKKNLIGALLFDSGETAEATRL |
| | Nickase | KRTARRRYTRRKNRICYLQEIFSNEMAKVDDSFFHRLEESFLVEEDKKHERHPIFGNIVDEVAY |
| | | HEKYPTIYHLRKKLVDSTDKADLRLIYLALAHMIKFRGHFLIEGDLNPDNSDVDKLFIQLVQTYN |
| | | QLFEENPINASGVDAKAILSARLSKSRRLENLIAQLPGEKKNGLFGNLIALSLGLTPNFKSNFDL |
| | | AEDAKLQLSKDTYDDDLDNLLAQIGDQYADLFLAAKNLSDAILLSDILRVNTEITKAPLSASMIK |
| | | RYDEHHQDLTLLKALVRQQLPEKYKEIFFDQSKNGYAGYIDGGASQEEFYKFIKPILEKMDGTE |
| | | ELLVKLNREDLLRKQRTFDNGSIPHQIHLGELHAILRRQEDFYPFLKDNREKIEKILTFRIPYYVG |
| | | PLARGNSRFAWMTRKSEETITPWNFEEVVDKGASAQSFIERMTNFDKNLPNEKVLPKHSLLY |
| | | EYFTVYNELTKVKYVTEGMRKPAFLSGEQKKAIVDLLFKTNRKVTVKQLKEDYFKKIECFDSVEI |
| | | SGVEDRFNASLGTYHDLLKIIKDKDFLDNEENEDILEDIVLTLTLFEDREMIEERLKTYAHLFDDK |
| | | VMKQLKRRRYTGWGRLSRKLINGIRDKQSGKTILDFLKSDGFANRNFMQLIHDDSLTFKEDI |
| | | QKAQVSGQGDSLHEHIANLAGSPAIKKGILQTVKVVDELVKVMGRHKPENIVIEMARENQT |
| | | TQKGQKNSRERMKRIEEGIKELGSQILKEHPVENTQLQNEKLYLYYLQNGRDMYVDQELDIN |
| | | RLSDYDVDAIVPQSFLKDDSIDNKVLTRSDKNRGKSDNVPSEEVVKKMKNYWRQLLNAKLIT |
| | | QRKFDNLTKAERGGLSELDKAGFIKRQLVETRQITKHVAQILDSRMNTKYDENDKLIREVKVIT |
| | | LKSKLVSDFRKDFQFYKVREINNYHHAHDAYLNAVVGTALIKKYPKLESEFVYGDYKVYDVRK |
| | | MIAKSEQEIGKATAKYFFYSNIMNFFKTEITLANGEIRKRPLIETNGETGEIVWDKGRDFATVR |
| | | KVLSMPQVNIVKKTEVQTGGFSKESILPKRNSDKLIARKKDWDPKKYGGFLWPTVAYSVLVV |
| | | AKVEKGKSKKLKSVKELLGITIMERSSFEKNPIDFLEAKGYKEVKKDLIIKLPKYSLFELENGRKR |
| | | MLASAKQLQKGNELALPSKYVNFLYLASHYEKLKGSPEDNEQKQLFVEQHKHYLDEIIEQISEF |
| | | SKRVILADANLDKVLSAYNKHRDKPIREQAENIIHLFTLTNLGAPAAFKYFDTTIDRKQYRSTKE |
| | | VLDATLIHQSITGLYETRIDLSQLGGD |
| 3720 | Met(−) | DKKYSIGLDIGTNSVGWAVITDEYKVPSKKFKVLGNTDRHSIKKNLIGALLFDSGETAEATRLK |
| | SpG(H839A) | RTARRRYTRRKNRICYLQEIFSNEMAKVDDSFFHRLEESFLVEEDKKHERHPIFGNIVDEVAYH |
| | Nickase | EKYPTIYHLRKKLVDSTDKADLRLIYLALAHMIKFRGHFLIEGDLNPDNSDVDKLFIQLVQTYN |
| | | QLFEENPINASGVDAKAILSARLSKSRRLENLIAQLPGEKKNGLFGNLIALSLGLTPNFKSNFDL |
| | | AEDAKLQLSKDTYDDDLDNLLAQIGDQYADLFLAAKNLSDAILLSDILRVNTEITKAPLSASMIK |
| | | RYDEHHQDLTLLKALVRQQLPEKYKEIFFDQSKNGYAGYIDGGASQEEFYKFIKPILEKMDGTE |
| | | ELLVKLNREDLLRKQRTFDNGSIPHQIHLGELHAILRRQEDFYPFLKDNREKIEKILTFRIPYYVG |
| | | PLARGNSRFAWMTRKSEETITPWNFEEVVDKGASAQSFIERMTNFDKNLPNEKVLPKHSLLY |
| | | EYFTVYNELTKVKYVTEGMRKPAFLSGEQKKAIVDLLFKTNRKVTVKQLKEDYFKKIECFDSVEI |
| | | SGVEDRFNASLGTYHDLLKIIKDKDFLDNEENEDILEDIVLTLTLFEDREMIEERLKTYAHLFDDK |
| | | VMKQLKRRRYTGWGRLSRKLINGIRDKQSGKTILDFLKSDGFANRNFMQLIHDDSLTFKEDI |
| | | QKAQVSGQGDSLHEHIANLAGSPAIKKGILQTVKVVDELVKVMGRHKPENIVIEMARENQT |
| | | TQKGQKNSRERMKRIEEGIKELGSQILKEHPVENTQLQNEKLYLYYLQNGRDMYVDQELDIN |
| | | RLSDYDVDAIVPQSFLKDDSIDNKVLTRSDKNRGKSDNVPSEEVVKKMKNYWRQLLNAKLIT |
| | | QRKFDNLTKAERGGLSELDKAGFIKRQLVETRQITKHVAQILDSRMNTKYDENDKLIREVKVIT |
| | | LKSKLVSDFRKDFQFYKVREINNYHHAHDAYLNAVVGTALIKKYPKLESEFVYGDYKVYDVRK |
| | | MIAKSEQEIGKATAKYFFYSNIMNFFKTEITLANGEIRKRPLIETNGETGEIVWDKGRDFATVR |
| | | KVLSMPQVNIVKKTEVQTGGFSKESILPKRNSDKLIARKKDWDPKKYGGFLWPTVAYSVLVV |
| | | AKVEKGKSKKLKSVKELLGITIMERSSFEKNPIDFLEAKGYKEVKKDLIIKLPKYSLFELENGRKR |
| | | MLASAKQLQKGNELALPSKYVNFLYLASHYEKLKGSPEDNEQKQLFVEQHKHYLDEIIEQISEF |
| | | SKRVILADANLDKVLSAYNKHRDKPIREQAENIIHLFTLTNLGAPAAFKYFDTTIDRKQYRSTKE |
| | | VLDATLIHQSITGLYETRIDLSQLGGD |

[0135] In some embodiments, a Cas9 protein comprises a variant Cas9 protein containing one or more amino acid substitutions. In some embodiments, a wildtype Cas9 protein comprises a RuvC domain and an HNH domain. In some embodiments, a prime editor comprises a nuclease active Cas9 protein that may cleave both strands of a double stranded target DNA sequence. In some embodiments, the nuclease active Cas9 protein comprises a functional RuvC domain and a functional HNH domain. In some embodiments, a prime editor comprises a Cas9 nickase that can bind to a guide polynucleotide and recognize a target DNA, but can cleave only one strand of a double stranded target DNA. In some embodiments, the Cas9 nickase comprises only one functional RuvC domain or one functional HNH domain. In some embodiments, a prime editor comprises a Cas9 that has a non-functional HNH domain and a functional RuvC domain. In some embodiments, the prime editor can cleave the edit strand (i.e. the PAM strand), but not the non-edit strand of a double stranded target DNA sequence. In some embodiments, a prime editor comprises a Cas9 having a non-functional RuvC domain that can cleave the target strand (i.e. the non-PAM strand), but not the edit strand of a double stranded target DNA sequence. In some embodiments, a prime editor comprises a Cas9 that has neither a functional RuvC domain nor a functional HNH domain, which may not cleave any strand of a double stranded target DNA sequence.

[0136] In some embodiments, a prime editor comprises a Cas9 having a mutation in the RuvC domain that reduces or abolishes the nuclease activity of the RuvC domain. In some embodiments, the Cas9 comprises a mutation at amino acid D10 as compared to a wild type SpCas9 as set forth in SEQ ID NO: 3693, or a corresponding mutation thereof. In some embodiments, the Cas9 comprises a D10A mutation as compared to a wild type SpCas9 as set forth in SEQ ID NO: 3693, or a corresponding mutation thereof. In some embodiments, the Cas9 polypeptide comprises a mutation at amino acid D10, G12, and/or G17 as compared to a wild type SpCas9 as set forth in SEQ ID NO: 3693, or a corresponding mutation thereof. In some embodiments, the Cas9 polypeptide comprises a D10A mutation, a G12A mutation, and/or a G17A mutation as compared to a wild type SpCas9 as set forth in SEQ ID NO: 3693, or a corresponding mutation thereof.

[0137] In some embodiments, a prime editor comprises a Cas9 polypeptide having a mutation in the HNH domain that reduces or abolishes the nuclease activity of the HNH domain. In some embodiments, the Cas9 polypeptide comprises a mutation at amino acid H840 as compared to a wild type SpCas9 as set forth in SEQ ID NO: 3693, or a corresponding mutation thereof. In some embodiments, the Cas9 polypeptide comprises a H840A mutation as compared to a wild type SpCas9 as set forth in SEQ ID NO: 3693, or a corresponding mutation thereof. In some embodiments, the Cas9 polypeptide comprises a mutation at amino acid E762, D839, H840, N854, N856, N863, H982, H983, A984, D986, and/or a A987 as compared to a wild type SpCas9 as set forth in SEQ ID NO: 3693, or a corresponding mutation thereof. In some embodiments, the Cas9 polypeptide comprises a E762A, D839A, H840A, N854A, N856A, N863A, H982A, H983A, A984A, and/or a D986A mutation as compared to a wild type SpCas9 as set forth in SEQ ID NO: 3693, or a corresponding mutation thereof. In some embodiments, the Cas9 polypeptide comprises a mutation at amino acid residue R221, N394, and/or H840 as compared to a wild type SpCas9 (e.g., SEQ ID NO: 3693). In some embodiments, the Cas9 polypeptide comprises a R221K, N394L, and/or H840A mutation as compared to a wild type SpCas9 as set forth in SEQ ID NO: 3693, or a corresponding mutation thereof. In some embodiments, the Cas9 polypeptide comprises a mutation at amino acid residue R220, N393, and/or H839 as compared to a wild type SpCas9 (e.g., SEQ ID NO: 3693) lacking a N-terminal methionine, or a corresponding mutation thereof. In some embodiments, the Cas9 polypeptide comprises a R220K, N393K, and/or H839A mutation as compared to a wild type SpCas9 (as set forth in SEQ ID NO: 3693) lacking a N-terminal methionine, or a corresponding mutation thereof.

[0138] In some embodiments, a prime editor comprises a Cas9 having one or more amino acid substitutions in both the HNH domain and the RuvC domain that reduce or abolish the nuclease activity of both the HNH domain and the RuvC domain. In some embodiments, the prime editor comprises a nuclease inactive Cas9, or a nuclease dead Cas9 (dCas9). In some embodiments, the dCas9 comprises a H840X substitution and a D10X mutation compared to a wild type SpCas9 as set forth in SEQ ID NO: 3693 or corresponding mutations thereof, wherein X is any amino acid other than H for the H840X substitution and any amino acid other than D for the D10X substitution. In some embodiments, the dead Cas9 comprises a H840A and a D10A mutation as compared to a wild type SpCas9 as set forth in SEQ ID NO: 3693, or corresponding mutations thereof.

[0139] In some embodiments, the N-terminal methionine is removed from the amino acid sequence of a Cas9 nickase, or from any Cas9 variant, ortholog, or equivalent disclosed or contemplated herein. For example, methionine-minus (Met (−)) Cas9 nickases include any one of the sequences set forth in SEQ ID NOs: 3695, 3696, 3699, 3702, 3705, 3708, 3711, 3714, 3717, 3720, or a variant thereof having an amino acid sequence that has at least 80%, at least 85%, at least 90%, at least 95%, or at least 99% sequence identity thereto.

[0140] Besides dead Cas9 and Cas9 nickase variants, the Cas9 proteins used herein may also include other Cas9 variants having at least about 70%, at least about 80%, at least about 90%, at least about 95%, at least about 96%, at least about 97%, at least about 98%, at least about 99%, at least about 99.5%, or at least about 99.9% sequence identity to any reference Cas9 protein, including any wild type Cas9, or mutant Cas9 (e.g., a dead Cas9 or Cas9 nickase), or fragment Cas9, or circular permutant Cas9, or other variant of Cas9 disclosed herein or known in the art. In some embodiments, a Cas9 variant may have 1, 2, 3, 4, 5, 6, 7, 8, 9, 10, 11, 12, 13, 14, 15, 16, 17, 18, 19, 20, 21, 22, 21, 24, 25, 26, 27, 28, 29, 30, 31, 32, 33, 34, 35, 36, 37, 38, 39, 40, 41, 42, 43, 44, 45, 46, 47, 48, 49, 50 or more amino acid changes compared to a reference Cas9, e.g., a wild type Cas9. In some embodiments, the Cas9 variant comprises a fragment of a reference Cas9 (e.g., a gRNA binding domain or a DNA-cleavage domain), such that the fragment is at least about 70% identical, at least about 80% identical, at least about 90% identical, at least about 95% identical, at least about 96% identical, at least about 97% identical, at least about 98% identical, at least about 99% identical, at least about 99.5% identical, or at least about 99.9% identical to the corresponding fragment of a reference Cas9, e.g., a wild type Cas9. In some embodiments, the fragment is at least 30%, at least 35%, at least 40%, at least 45%, at least 50%, at least 55%, at least 60%, at least 65%, at least 70%, at least 75%, at least 80%, at least 85%, at least 90%, at least 95% identical, at least 96%, at least 97%, at least 98%, at least 99%, or at least 99.5% of the amino acid length of a corresponding wild type Cas9.

[0141] In some embodiments, a Cas9 fragment is a functional fragment that retains one or more Cas9 activities. In some embodiments, the Cas9 fragment is at least 100 amino acids in length. In some embodiments, the fragment is at least 100, 150, 200, 250, 300, 350, 400, 450, 500, 550, 600, 650, 700, 750, 800, 850, 900, 950, 1000, 1050, 1100, 1150, 1200, 1250, or at least 1300 amino acids in length.

[0142] In some embodiments, a prime editor comprises a Cas protein, e.g., Cas9, containing modifications that allow altered PAM recognition. In prime editing using a Cas-protein-based prime editor, a “protospacer adjacent motif (PAM)”, PAM sequence, or PAM-like motif, may be used to refer to a short DNA sequence immediately following the protospacer sequence on the PAM strand of the target gene. In some embodiments, the PAM is recognized by the Cas nuclease in the prime editor during prime editing. In certain embodiments, the PAM is required for target binding of the Cas protein. The specific PAM sequence required for Cas protein recognition may depend on the specific type of the Cas protein. A PAM can be 1, 2, 3, 4, 5, 6, 7, 8, 9, 10 or more nucleotides in length. In some embodiments, a PAM is between 2-6 nucleotides in length. In some embodiments, the PAM can be a 5′ PAM (i.e., located upstream of the 5′ end of the protospacer). In other embodiments, the PAM can be a 3′ PAM (i.e., located downstream of the 5′ end of the protospacer). In some embodiments, the Cas protein of a prime editor recognizes a canonical PAM, for example, a SpCas9 recognizes 5′-NGG-3′ PAM. In some embodiments, the Cas protein of a prime editor has altered or non-canonical PAM specificities. Exemplary PAM sequences and corresponding Cas variants are described in Table 54 below. It should be appreciated that for each of the variants provided, the Cas protein comprises one or more of the amino acid substitutions as indicated compared to a wild type Cas protein sequence, for example, the wild type Cas9 as set forth in SEQ ID NO: 3693. The PAM motifs as shown in Table 54 below are in the order of 5′ to 3′. In some embodiments, the Cas proteins of the disclosure can also be used to direct transcriptional control of target sequences, for example silencing transcription by sequence-specific binding to target sequences. In some embodiments, a Cas protein described herein may have one or mutations in a PAM recognition motif. In some embodiments, a Cas protein described herein may have altered PAM specificity.

[0143] As used in PAM sequences in Table 54, “N” refers to any one of the nucleotides A, G, C, and T; “R” refers to nucleotide A or G; “W” refers to A or T; “V” refers to A, C, or G and “Y” refers to nucleotide C or T

TABLE 54
Cas protein variants and corresponding PAM sequences

| Variant | PAM |
|---|---|
| spCas9 (wild type) | NGG, NGA, |
| | NAG, NGNGA |
| spCas9-VRVRFRR R1335V, L1111R, D1135V, G1218R, | NG |
| E1219F, A1322R, T1337R | |
| spCas9-VQR (D1135V, R1335Q, T1337R) | NGA |
| spCas9-EQR (D1135E, R1335Q, T1337R) | NGA |
| spCas9-VRER (D1135V, G1218R, R1335E, T1337R) | NGCG |
| spCas9-VRQR (D1135V, G1218R, R1335Q, T1337R) | NGA |
| Cas9-NG (L1111R, D1135V, G1218R, E1219F, A1322R, | NGN |
| T1337R, R1335V) | |
| SpG Cas9 (D1135L, S1136W, G1218K, E1219Q, | NGN |
| R1335Q, T1337R) | |
| SyRY Cas9 | NRN |
| (A61R, L1111R, N1317R, A1322R, and R1333P) | |
| xCas9 (E480K, E543D, E1219V, K294R, Q1256K, | NGN |
| A262T, S409I, M694I) | |
| SluCa9 | NNGG |
| sRGN1, sRGN2, sRGN4, sRGN3.1, sRGN3.3 | NNGG |
| saCas9 | NNGRRT, |
| | NNGRRN |
| saCas9-KKH (E782K, N968K, R1015H) | NNNRRT |
| spCas9-MQKSER (D1135M, S1136Q, G1218K, E1219S, | NGCG/NGCN |
| R1335E, T1337R) | |
| spCas9-LRKIQK (D1135L, S1136R, G1218K, E1219I, | NGTN |
| R1335Q, T1337K) | |
| spCas9-LRVSQK (D1135L, S1136R, G1218V, E1219S, | NGTN |
| R1335Q, T1337K) | |
| spCas9-LRVSQL(D1135L, S1136R, G1218V, E1219S, | NGTN |
| R1335Q, T1337L) | |
| Cpf1 | TTTV |
| Spy-Mac | NAA |
| NmCas9 | NNNNGATT |
| StCas9 | NNAGAAW |
| TdCas9 | NAAAAC |

[0144] In some embodiments, a prime editor comprises a Cas9 polypeptide comprising one or mutations selected from the group consisting of: A61R, L111R, D1135V, R221K, A262T, R324L, N394K, S409I, S409I, E427G, E480K, M495V, N497A, Y515N, K526E, F539S, E543D), R654L, R661A, R661L, R691A, N692A, M694A, M6941, Q695A, H698A, R753G, M7631, K848A, K890N, Q926A, K1003A, R1060A, L1111R, R1114G, D1135E, D1135L, D1135N, S1136W, V1139A, D1180G, G1218K, G1218R, G1218S, E1219Q, E1219V, E1219V, Q12211H, P1249S, E1253K, N1317R, A1320V, P1321S, A1322R, I1322V, D1332G, R1332N, A1332R, R1333K, R1333P, R1335L, R1335Q, R1335V, T1337N, T1337R, S1338T, H1349R, and any combinations thereof as compared to a wildtype SpCas9 polypeptide as set forth in SEQ ID NO: 3693.

[0145] In some embodiments, a prime editor comprises a SaCas9 polypeptide. In some embodiments, the SaCas9 polypeptide comprises one or more of mutations E782K, N968K, and R1015H as compared to a wild type SaCas9. In some embodiments, a prime editor comprises a FnCas9 polypeptide, for example, a wildtype FnCas9 polypeptide or a FnCas9 polypeptide comprising one or more of mutations E1369R, E1449H, or R1556A as compared to the wild type FnCas9. In some embodiments, a prime editor comprises a Sc Cas9, for example, a wild type ScCas9 or a ScCas9 polypeptide comprises one or more of mutations 1367K, G368D, 1369K, H371L, T375S, T376G, and T1227K as compared to the wild type ScCas9. In some embodiments, a prime editor comprises a St1 Cas9 polypeptide, a St3 Cas9 polypeptide, or a SluCas9 polypeptide.

[0146] In some embodiments, a prime editor comprises a Cas polypeptide that comprises a circular permutant Cas variant. For example, a Cas9 polypeptide of a prime editor may be engineered such that the N-terminus and the C-terminus of a Cas9 protein (e.g., a wild type Cas9 protein, or a Cas9 nickase) are topically rearranged to retain the ability to bind DNA when complexed with a guide RNA (gRNA). An exemplary circular permutant configuration can be N-terminus-[original C-terminus]-[original N-terminus]-C-terminus. Any of the Cas9 proteins described herein, including any variant, ortholog, or naturally occurring Cas9 or equivalent thereof, may be reconfigured as a circular permutant variant.

[0147] In various embodiments, the circular permutants of a Cas protein, e.g., a Cas9, may have the following structure: N-terminus-[original C-terminus]-[optional linker]-[original N-terminus]-C-terminus. In some embodiments, a circular permutant Cas9 comprises any one of the following structures (amino acid positions as set forth in SEQ ID NO: 3693):
[0148] N-terminus-[1268-1368]-[optional linker]-[1-1267]-C-terminus;
[0149] N-terminus-[1168-1368]-[optional linker]-[1-1167]-C-terminus;
[0150] N-terminus-[1068-1368]-[optional linker]-[1-1067]-C-terminus;
[0151] N-terminus-[968-1368]-[optional linker]-[1-967]-C-terminus;
[0152] N-terminus-[868-1368]-[optional linker]-[1-867]-C-terminus;
[0153] N-terminus-[768-1368]-[optional linker]-[1-767]-C-terminus;
[0154] N-terminus-[668-1368]-[optional linker]-[1-667]-C-terminus;
[0155] N-terminus-[568-1368]-[optional linker]-[1-567]-C-terminus;
[0156] N-terminus-[468-1368]-[optional linker]-[1-467]-C-terminus;
[0157] N-terminus-[368-1368]-[optional linker]-[1-367]-C-terminus;
[0158] N-terminus-[268-1368]-[optional linker]-[1-267]-C-terminus;
[0159] N-terminus-[168-1368]-[optional linker]-[1-167]-C-terminus;
[0160] N-terminus-[68-1368]-[optional linker]-[1-67]-C-terminus;
[0161] N-terminus-[10-1368]-[optional linker]-[1-9]-C-terminus, or the corresponding circular permutants of other Cas9 proteins (including other Cas9 orthologs, variants, etc).

[0162] In some embodiments, a circular permutant Cas9 comprises any one of the following structures (amino acid positions as set forth in SEQ ID NO: 3693-1368 amino acids of UniProtKB-Q99ZW2:
[0163] N-terminus-[102-1368]-[optional linker]-[1-101]-C-terminus;
[0164] N-terminus-[1028-1368]-[optional linker]-[1-1027]-C-terminus;
[0165] N-terminus-[1041-1368]-[optional linker]-[1-1043]-C-terminus;
[0166] N-terminus-[1249-1368]-[optional linker]-[1-1248]-C-terminus; or
[0167] N-terminus-[1300-1368]-[optional linker]-[1-1299]-C-terminus, or the corresponding circular permutants of other Cas9 proteins (including other Cas9 orthologs, variants, etc).

[0168] In some embodiments, a circular permutant Cas9 comprises any one of the following structures (amino acid positions as set forth in SEQ ID NO: 3693-1368 amino acids of UniProtKB-Q99ZW2 N-terminus-[103-1368]-[optional linker]-[1-102]-C-terminus:
[0169] N-terminus-[1029-1368]-[optional linker]-[1-1028]-C-terminus;
[0170] N-terminus-[1042-1368]-[optional linker]-[1-1041]-C-terminus;
[0171] N-terminus-[1250-1368]-[optional linker]-[1-1249]-C-terminus; or
[0172] N-terminus-[1301-1368]-[optional linker]-[1-1300]-C-terminus, or the corresponding circular permutants of other Cas9 proteins (including other Cas9 orthologs, variants, etc).

[0173] In some embodiments, the circular permutant can be formed by linking a C-terminal fragment of a Cas9 to an N-terminal fragment of a Cas9, either directly or by using a linker, such as an amino acid linker. In some embodiments, the C-terminal fragment may correspond to the 95% or more of the C-terminal amino acids of a Cas9 (e.g., amino acids about 1300-1368 as set forth in SEQ ID No: 3693 or corresponding amino acid positions thereof), or the 90%, 85%, 80%, 75%, 70%, 65%, 60%, 55%, 50%, 45%, 40%, 35%, 30%, 25%, 20%, 15%, 10%, or 5% or more of the C-terminal amino acids of a Cas9 (e.g., SEQ ID NO: 3693 or a ortholog or a variant thereof). The N-terminal portion may correspond to 95% or more of the N-terminal amino acids of a Cas9 (e.g., amino acids about 1-1300 as set forth in SEQ ID No: 3693 or corresponding amino acid positions thereof), or 90%, 85%, 80%, 75%, 70%, 65%, 60%, 55%, 50%, 45%, 40%, 35%, 30%, 25%, 20%, 15%, 10%, or 5% or more of the N terminal amino acids of a Cas9 (e.g., as set forth in SEQ ID NO: 3693 or corresponding amino acid positions thereof).

[0174] In some embodiments, the circular permutant can be formed by linking a C-terminal fragment of a Cas9 to an N-terminal fragment of a Cas9, either directly or by using a linker, such as an amino acid linker. In some embodiments, the C-terminal fragment that is rearranged to the N-terminus includes or corresponds to the C-terminal 30% or less of the amino acids of a Cas9 (e.g., amino acids 1012-1368 as set forth in SEQ ID NO: 3693 or corresponding amino acid positions thereof). In some embodiments, the C-terminal fragment that is rearranged to the N-terminus, includes or corresponds to the C-terminal 30%, 29%, 28%, 27%, 26%, 25%, 24%, 23%, 22%, 21%, 20%, 19%, 18%, 17%, 16%, 15%, 14%, 13%, 12%, 11%, 10%, 9%, 8%, 7%, 6%,5%, 4%, 3%, 2%, or 1% of the amino acids of a Cas9 (e.g., as set forth in SEQ ID NO: 3693 or corresponding amino acid positions thereof). In some embodiments, the C-terminal fragment that is rearranged to the N-terminus, includes or corresponds to the C-terminal 410 residues or less of a Cas9 (e.g., as set forth in SEQ ID NO: 3693 or corresponding amino acid positions thereof). In some embodiments, the C-terminal portion that is rearranged to the N-terminus, includes or corresponds to the C-terminal 410, 400, 390, 380, 370, 360, 350, 340, 330, 320, 310, 300, 290, 280, 270, 260, 250, 240, 230, 220, 210, 200, 190, 180, 170, 160, 150, 140, 130, 120, 110, 100, 90, 80, 70, 60, 50, 40, 30, 20, or 10 residues of a Cas9 (e.g., as set forth in SEQ ID NO: 3693 or corresponding amino acid positions thereof). In some embodiments, the C-terminal portion that is rearranged to the N-terminus includes or corresponds to the C-terminal 357, 341, 328, 120, or 69 residues of a Cas9 (e.g., as set forth in SEQ ID NO: 3693 or corresponding amino acid positions thereof).

[0175] In other embodiments, circular permutant Cas9 variants may be a topological rearrangement of a Cas9 primary structure based on the following method, which is based on S. pyogenes Cas9 of SEQ ID NO: 3693: (a) selecting a circular permutant (CP) site corresponding to an internal amino acid residue of the Cas9 primary structure, which dissects the original protein into two halves: an N-terminal region and a C-terminal region; (b) modifying the Cas9 protein sequence (e.g., by genetic engineering techniques) by moving the original C-terminal region (comprising the CP site amino acid) to precede the original N-terminal region, thereby forming a new N-terminus of the Cas9 protein that now begins with the CP site amino acid residue. The CP site can be located in any domain of the Cas9 protein, including, for example, the helical-II domain, the RuvCIII domain, or the CTD domain. For example, the CP site may be located (as set forth in SEQ ID NO: 3693 or corresponding amino acid positions thereof) at original amino acid residue 181, 199, 230, 270, 310, 1010, 1016, 1023, 1029, 1041, 1247, 1249, or 1282. Thus, once relocated to the N-terminus, original amino acid 181, 199, 230, 270, 310, 1010, 1016, 1023, 1029, 1041, 1247, 1249, or 1282 would become the new N-terminal amino acid. Nomenclature of these CP-Cas9 proteins may be referred to as Cas9-CP¹⁸¹, Cas9-CP¹⁹⁹, Cas9-CP²³⁰, Cas9-CP²⁷⁰, Cas9-CP³¹⁰, Cas9-CP¹⁰¹⁰, Cas9-CP¹⁰¹⁶, Cas9-CP¹⁰²³ Cas9-CP¹⁰²⁹, Cas9-CP¹⁰⁴¹, Cas9-CP¹²⁴⁷, Cas9-CP¹²⁴⁹ and Cas9-CP¹²⁸² respectively. This description is not meant to be limited to making CP variants from SEQ ID NO: 3693, but may be implemented to make CP variants in any Cas9 sequence, either at CP sites that correspond to these positions, or at other CP sites entirely. This description is not meant to limit the specific CP sites in any way. Virtually any CP site may be used to form a CP-Cas9 variant.

[0176] In some embodiments, a prime editor comprises a Cas9 functional variant that is of smaller molecular weight than a wild type SpCas9 protein. In some embodiments, a smaller-sized Cas9 functional variant may facilitate delivery to cells, e.g., by an expression vector, nanoparticle, or other means of delivery. In certain embodiments, a smaller-sized Cas9 functional variant is a Class 2 Type II Cas protein. In certain embodiments, a smaller-sized Cas9 functional variant is a Class 2 Type V Cas protein. In certain embodiments, a smaller-sized Cas9 functional variant is a Class 2 Type VI Cas protein.

[0177] In some embodiments, a prime editor comprises a SpCas9 that is 1368 amino acids in length and has a predicted molecular weight of 158 kilodaltons. In some embodiments, a prime editor comprises a Cas9 functional variant or functional fragment that is less than 1300 amino acids, less than 1290 amino acids, than less than 1280 amino acids, less than 1270 amino acids, less than 1260 amino acid, less than 1250 amino acids, less than 1240 amino acids, less than 1230 amino acids, less than 1220 amino acids, less than 1210 amino acids, less than 1200 amino acids, less than 1190 amino acids, less than 1180 amino acids, less than 1170 amino acids, less than 1160 amino acids, less than 1150 amino acids, less than 1140 amino acids, less than 1130 amino acids, less than 1120 amino acids, less than 1110 amino acids, less than 1100 amino acids, less than 1050 amino acids, less than 1000 amino acids, less than 950 amino acids, less than 900 amino acids, less than 850 amino acids, less than 800 amino acids, less than 750 amino acids, less than 700 amino acids, less than 650 amino acids, less than 600 amino acids, less than 550 amino acids, or less than 500 amino acids, but at least larger than about 400 amino acids and retaining the one or more functions, e.g., DNA binding function, of the Cas9 protein.

[0178] In some embodiments, the Cas protein may include any CRISPR associated protein, including but not limited to, Cas12a, Cas12b1, Cas1, Cas1B, Cas2, Cas3, Cas4, Cas5, Cas6, Cas7, Cas8, Cas9 (also known as Csn1 and Csx12), Cas10, Csy1, Csy2, Csy3, Cse1, Cse2, Csc1, Csc2, Csa5, Csn2, Csm2, Csm3, Csm4, Csm5, Csm6, Cmr1, Cmr3, Cmr4, Cmr5, Cmr6, Csb1, Csb2, Csb3, Csx17, Csx14, Csx10, Csx16, CsaX, Csx3, Csx1, Csx15, Csf1, Csf2, Csf3, Csf4, homologs thereof, or modified versions thereof, and preferably comprising a nickase mutation (e.g., a mutation corresponding to the D10A mutation of the wild type Cas9 polypeptide of SEQ ID NO: 3693). In various other embodiments, the napDNAbp can be any of the following proteins: a Cas9, a Cas12a (Cpf1), a Cas12e (CasX), a Cas12d (CasY), a Cas12b1 (C2c1), a Cas13a (C2c2), a Cas12c (C2c3), a GeoCas9, a CjCas9, a Cas12g, a Cas12h, a Cas12i, a Cas13b, a Cas13c, a Cas13d, a Cas14, a Csn2, an xCas9, an SpCas9-NG, a circularly permuted Cas9, or an Argonaute (Ago) domain, or a functional variant or fragment thereof.

[0179] Exemplary Cas proteins and nomenclature are shown in Table 55 below:

TABLE 55
Exemplary Cas proteins and nomenclature

| Legacy nomenclature | Current nomenclature |
|---|---|
| type II CRISPR-Cas enzymes | |
| Cas9 | same |
| type V CRISPR-Cas enzymes | |
| Cpf1 | Cas12a |
| CasX | Cas12e |
| C2c1 | Cas12b1 |
| Cas12b2 | same |
| C2c3 | Cas12c |
| CasY | Cas12d |
| C2c4 | same |
| C2c8 | same |
| C2c5 | same |
| C2c10 | same |
| C2c9 | same |
| type VI CRISPR-Cas enzymes | |
| C2c2 | Cas13a |
| Cas13d | same |
| C2c7 | Cas13c |
| C2c6 | Cas13b |

[0180] In some embodiments, prime editors described herein can also comprise Cas proteins other than Cas9. For example, in some embodiments, a prime editor as described herein can comprise a Cas12 polypeptide such as a Cas12a (Cpf1) polypeptide or functional variants thereof. In some embodiments, the Cas12a polypeptide comprises a mutation that reduces or abolishes the endonuclease domain of the Cas12a polypeptide. In some embodiments, the Cas12a polypeptide is a Cas12a nickase. In some embodiments, the Cas protein comprises an amino acid sequence that comprises at least about 50%, 60%, 70%, 80%, 90%, 91%, 92%, 93%, 94%, 95%, 96%, 97%, 98%, 99%, or 100% sequence identity to a naturally occurring Cas12a polypeptide.

[0181] In some embodiments, a prime editor comprises a Cas protein that is a Cas12b (C2c1) or a Cas12c (C2c3) polypeptide. In some embodiments, the Cas protein comprises an amino acid sequence that comprises at least about 50%, 60%, 70%, 80%, 90%, 91%, 92%, 93%, 94%, 95%, 96%, 97%, 98%, 99%, or 100% sequence identity to a naturally occurring Cas12b (C2c1) or Cas12c (C2c3) protein. In some embodiments, the Cas protein is a Cas12b nickase or a Cas12c nickase. In some embodiments, the Cas protein is a Cas12e, a Cas12d, a Cas13, Cas14a, Cas14b, Cas14c, Cas14d, Cas14e, Cas14f, Cas14g, Cas14h, Cas14u, or a CasD polypeptide. In some embodiments, the Cas protein comprises an amino acid sequence that comprises at least about 50%, 60%, 70%, 80%, 90%, 91%, 92%, 93%, 94%, 95%, 96%, 97%, 98%, 99%, or 100% sequence identity to a naturally-occurring Cas12e, Cas12d, Cas13, Cas14a, Cas14b, Cas14c, Cas14d, Cas14e, Cas14f, Cas14g, Cas14h, Cas14u, or Cas Φ protein. In some embodiments, the Cas protein is a Cas12e, Cas12d, Cas13, or Cas Φ nickase.

### Nuclear Localization Sequences

[0182] In some embodiments, a prime editor further comprises one or more nuclear localization sequence (NLS). In some embodiments, the NLS helps promote translocation of a protein into the cell nucleus. In some embodiments, a prime editor comprises a fusion protein, e.g., a fusion protein comprising a DNA binding domain and a DNA polymerase, that comprises one or more NLSs. In some embodiments, one or more polypeptides of the prime editor are fused to or linked to one or more NLSs. In some embodiments, the prime editor comprises a DNA binding domain and a DNA polymerase domain that are provided in trans, wherein the DNA binding domain and/or the DNA polymerase domain is fused or linked to one or more NLSs.

[0183] In certain embodiments, a prime editor or prime editing complex comprises at least one NLS. In some embodiments, a prime editor or prime editing complex comprises at least two NLSs. In embodiments with at least two NLSs, the NLSs can be the same NLS, or they can be different NLSs.

[0184] In some instances, a prime editor may further comprise at least one nuclear localization sequence (NLS). In some cases, a prime editor may further comprise 1 NLS. In some cases, a prime editor may further comprise 2 NLSs. In other cases, a prime editor may further comprise 3 NLSs. In one case, a primer editor can further comprise more than 4, 5, 6, 7, 8, 9 or 10 NLSs.

[0185] In addition, the NLSs can be expressed as part of a prime editor complex. In some embodiments, a NLS can be positioned almost anywhere in a protein's amino acid sequence, and generally comprises a short sequence of three or more or four or more amino acids. The location of the NLS fusion can be at the N-terminus, the C-terminus, or positioned anywhere within a sequence of a prime editor or a component thereof (e.g., inserted between the DNA-binding domain and the DNA polymerase domain of a prime editor fusion protein, between the DNA binding domain and a linker sequence, between a DNA polymerase and a linker sequence, between two linker sequences of a prime editor fusion protein or a component thereof, in either N-terminus to C-terminus or C-terminus to N-terminus order). In some embodiments, a prime editor is fusion protein that comprises an NLS at the N terminus. In some embodiments, a prime editor is fusion protein that comprises an NLS at the C terminus. In some embodiments, a prime editor is fusion protein that comprises at least one NLS at both the N terminus and the C terminus. In some embodiments, the prime editor is a fusion protein that comprises two NLSs at the N terminus and/or the C terminus.

[0186] Any NLSs that are known in the art are also contemplated herein. The NLSs may be any naturally occurring NLS, or any non-naturally occurring NLS (e.g., an NLS with one or more mutations relative to a wild-type NLS). In some embodiments, the one or more NLSs of a prime editor comprise bipartite NLSs. In some embodiments, a nuclear localization signal (NLS) is predominantly basic. In some embodiments, the one or more NLSs of a prime editor are rich in lysine and arginine residues. In some embodiments, the one or more NLSs of a prime editor comprise proline residues. In some embodiments, a nuclear localization signal (NLS) comprises the sequence

(SEQ ID NO: 3721)
MDSLLMNRRKFLYQFKNVRWAKGRRETYLC,
(SEQ ID NO: 3722)
KRTADGSEFESPKKKRKV,
(SEQ ID NO: 3723)
KRTADGSEFEPKKKRKV,
(SEQ ID NO: 3724)
NLSKRPAAIKKAGQAKKKK,
(SEQ ID NO: 3725)
RQRRNELKRSF,
or
(SEQ ID NO: 3726)
NQSSNFGPMKGGNFGGRSSGPYGGGGQYFAKPRNQGGY.

[0187] In some embodiments, a NLS is a monopartite NLS. For example, in some embodiments, a NLS is a SV40 large T antigen NLS PKKKRKV (SEQ ID NO: 3727). In some embodiments, a NLS is a bipartite NLS. In some embodiments, a bipartite NLS comprises two basic domains separated by a spacer sequence comprising a variable number of amino acids. In some embodiments, a NLS is a bipartite NLS. In some embodiments, a bipartite NLS consists of two basic domains separated by a spacer sequence comprising a variable number of amino acids. In some embodiments, the spacer amino acid sequence comprises the sequence KRXXXXXXXXXXKKKL (Xenopus nucleoplasmin NLS) (SEQ ID NO: 3728), wherein X is any amino acid. In some embodiments, the NLS comprises a nucleoplasmin NLS sequence KRPAATKKAGQAKKKK (SEQ ID NO: 3729). In some embodiments, a NLS is a noncanonical sequences such as M9 of the hnRNP Al protein, the influenza virus nucleoprotein NLS, and the yeast Gal4 protein NLS. In some embodiments, a NLS is a noncanonical sequences such as M9 of the hnRNP Al protein, the influenza virus nucleoprotein NLS, and the yeast Gal4 protein NLS.

[0188] Other non-limiting examples of NLS sequences are provided in Table 56 below. In some embodiments, a bipartite NLS consists of two basic domains separated by a spacer sequence comprising a variable number of amino acids. In some embodiments, a NLS comprises an amino acid sequence that is at least about 50%, 60%, 70%, 80%, 90%, 91%, 92%, 93%, 94%, 95%, 96%, 97%, 98%, 99%, or 100% identical to the amino acid sequence of any one of SEQ ID NOs: 3721-3739. In some embodiments, a NLS comprises an amino acid sequence selected from the group consisting of SEQ ID NOs: 3721-3739. In some embodiments, a prime editing composition comprises a polynucleotide that encodes a NLS that comprises an amino acid sequence that is at least about 50%, 60%, 70%, 80%, 90%, 91%, 92%, 93%, 94%, 95%, 96%, 97%, 98%, 99%, or 100% identical to the amino acid sequence of any one of SEQ ID NOs: 3721-3739. In some embodiments, a prime editing composition comprises a polynucleotide that encodes a NLS that comprises an amino acid sequence selected from the group consisting of 3721-3739.

[0189] Any NLSs that are known in the art are also contemplated herein. The NLSs may be any naturally occurring NLS, or any non-naturally occurring NLS (e.g., an NLS with one or more mutations relative to a wild-type NLS). In some embodiments, the one or more NLSs of a prime editor comprise bipartite NLSs. In some embodiments, the one or more NLSs of a prime editor are rich in lysine and arginine residues. In some embodiments, the one or more NLSs of a prime editor comprise proline residues. Non-limiting examples of NLS sequences are provided in Table 56 below.

TABLE 56
Exemplary nuclear localization sequences

| Description | Sequence | SEQ ID NO: |
|---|---|---|
| NLS of SV40 Large T-AG | PKKKRKV | 3727 |
| NLS | MKRTADGSEFESPKKKRKV | 3730 |
| NLS | MDSLLMNRRKFLYQFKNVRWAKGRRETYLC | 3721 |
| NLS of Nucleoplasmin | AVKRPAATKKAGQAKKKKLD | 3731 |
| NLS of EGL-13 | MSRRRKANPTKLSENAKKLAKEVEN | 3732 |
| NLS of C-Myc | PAAKRVKLD | 3733 |
| NLS of Tus-protein | KLKIKRPVK | 3734 |
| NLS of polyoma large T-AG | VSRKRPRP | 3735 |
| NLS of Hepatitis D virus | EGAPPAKRAR | 3736 |
| antigen | | |
| NLS of Rev protein | RQARRNRRRRWRERNR | 3737 |
| NLS of murine p53 | PPQPKKKPLDGE | 3738 |
| C terminal linker and NLS | SGGSKRTADGSEFEPKKKRKV | 3739 |
| of an exemplary prime | | |
| editor fusion protein | | |
| NLS | KRTADGSEFEPKKKRKV | 3723 |

[0190] In some embodiments, a prime editing complex comprises a fusion protein comprising a DNA binding domain (e.g., Cas9(H840A)) and a reverse transcriptase (e.g., a variant MMLV RT) having the following structure: [NLS]-[Cas9(H840A)]-[linker]-[MMLV_RT(D200N)(T330P)(L603W)(T306K)(W313F)], and a desired PEgRNA. In some embodiments, the prime editing complex comprises a prime editor fusion protein that has the amino acid sequence of SEQ ID NO: 3740. In some embodiments, a prime editor fusion protein comprises an amino acid sequence that is at least about 70% identical, at least about 80% identical, at least about 90% identical, at least about 95% identical, at least about 96% identical, at least about 97% identical, at least about 98% identical, at least about 99% identical, at least about 99.5% identical, or at least about 99.9% identical to SEQ ID NO: 3740 set forth in Table 57. In some embodiments, a prime editor fusion protein comprises an amino acid sequence that lacks a N-terminus methionine relative to an amino acid sequence set forth in SEQ ID NO: 3740. Sequence of an exemplary prime editor fusion protein comprising a DNA binding domain (e.g., Cas9(H840A)) and a reverse transcriptase (e.g., a variant MMLV RT) having the following structure: [NLS]-[Cas9(H840A)]-[linker]-[MMLV_RT(D200N)(T330P)(L603W)(T306K)(W313F)] and its components are shown in Table 57.

[0191] In some embodiments, a prime editing complex comprises a fusion protein comprising a DNA binding domain (e.g., Cas9((R221K N394K H840A)) and a reverse transcriptase (e.g., a variant MMLV RT) having the following structure: [NLS]-[Cas9((R221K N394K H840A)]-[linker]-[MMLV_RT(D200N)(T330P)(L603W)(T306K)(W313F)], and a desired PEgRNA. In some embodiments, the prime editing complex comprises a prime editor fusion protein that has the amino acid sequence of SEQ ID NO: 3741. In some embodiments, a prime editor fusion protein comprises an amino acid sequence that is at least about 70% identical, at least about 80% identical, at least about 90% identical, at least about 95% identical, at least about 96% identical, at least about 97% identical, at least about 98% identical, at least about 99% identical, at least about 99.5% identical, or at least about 99.9% identical to SEQ ID NO: 3741 set forth in Table 58. In some embodiments, a prime editor fusion protein comprises an amino acid sequence that lacks a N-terminus methionine relative to an amino acid sequence set forth in SEQ ID NO: 3741. Sequence of an exemplary prime editor fusion protein comprising a DNA binding domain (e.g., Cas9(H840A)) and a reverse transcriptase (e.g., a variant MMLV RT) having the following structure: [NLS]-[Cas9 (R221K N394K H840A)]-[linker]-[MMLV_RT(D200N)(T330P)(L603W)(T306K)(W313F)] and its components are shown in Table 58.

[0192] Polypeptides comprising components of a prime editor may be fused via peptide linkers, or may be provided in trans relevant to each other. For example, a reverse transcriptase may be expressed, delivered, or otherwise provided as an individual component rather than as a part of a fusion protein with the DNA binding domain. In such cases, components of the prime editor may be associated through non-peptide linkages or co-localization functions. In some embodiments, a prime editor further comprises additional components capable of interacting with, associating with, or capable of recruiting other components of the prime editor or the prime editing system. For example, a prime editor may comprise an RNA-protein recruitment polypeptide that can associate with an RNA-protein recruitment RNA aptamer.

[0193] In some embodiments, an RNA-protein recruitment polypeptide can recruit, or be recruited by, a specific RNA sequence. Non limiting examples of RNA-protein recruitment polypeptide and RNA aptamer pairs include a MS2 coat protein and a MS2 RNA hairpin, a PCP polypeptide and a PP7 RNA hairpin, a Com polypeptide and a Com RNA hairpin, a Ku protein and a telomerase Ku binding RNA motif, and a Sm7 protein and a telomerase Sm7 binding RNA motif. In some embodiments, the prime editor comprises a DNA binding domain fused or linked to an RNA-protein recruitment polypeptide. In some embodiments, the prime editor comprises a DNA polymerase domain fused or linked to an RNA-protein recruitment polypeptide. In some embodiments, the DNA binding domain and the DNA polymerase domain fused to the RNA-protein recruitment polypeptide, or the DNA binding domain fused to the RNA-protein recruitment polypeptide and the DNA polymerase domain are co-localized by the corresponding RNA-protein recruitment RNA aptamer of the RNA-protein recruitment polypeptide. In some embodiments, the corresponding RNA-protein recruitment RNA aptamer fused or linked to a portion of the PEgRNA or ngRNA. For example, an MS2 coat protein fused or linked to the DNA polymerase and a MS2 hairpin installed on the PEgRNA for co-localization of the DNA polymerase and the RNA-guided DNA binding domain (e.g., a Cas9 nickase).

[0194] In some embodiments, a prime editor comprises a polypeptide domain, an MS2 coat protein (MCP), that recognizes an MS2 hairpin. In some embodiments, the nucleotide sequence of the MS2 hairpin (or equivalently referred to as the “MS2 aptamer”) is:

(SEQ ID NO: 3742)
GCCAACATGAGGATCACCCATGTCTGCAGGGCC.

amino acid sequence of the MCP is:

(SEQ ID NO: 3743)
GSASNFTQFVLVDNGGTGDVTVAPSNFANGVAEWISSNSRSQAYKVTCS
VRQSSAQNRKYTIKVEVPKVATQTVGGEELPVAGWRSYLNMELTIPIFA
TNSDCELIVKAMQGLLKDGNPIPSAIAANSGIY.

[0195] In certain embodiments, components of a prime editor are directly fused to each other. In certain embodiments, components of a prime editor are associated to each other via a linker.

[0196] As used herein, a linker can be any chemical group or a molecule linking two molecules or moieties, e.g., a DNA binding domain and a polymerase domain of a prime editor. In some embodiments, a linker is an organic molecule, group, polymer, or chemical moiety. In some embodiments, the linker comprises a non-peptide moiety. The linker may be as simple as a covalent bond, or it may be a polymeric linker many atoms in length, for example, a polynucleotide sequence. In certain embodiments, the linker is a covalent bond (e.g., a carbon-carbon bond, disulfide bond, carbon-heteroatom bond, etc.).

[0197] In certain embodiments, two or more components of a prime editor are linked to each other by a peptide linker. In some embodiments, a peptide linker is 5-100 amino acids in length, for example, 2, 3, 4, 5, 6, 7, 8, 9, 10, 11, 12, 13, 14, 15, 16, 17, 18, 19, 20, 21, 22, 23, 24, 25, 26, 27, 28, 29, 30, 30-35, 35-40, 40-45, 45-50, 50-60, 60-70, 70-80, 80-90, 90-100, 100-150, or 150-200 amino acids in length. In some embodiments, the peptide linker is 16 amino acids in length, 24 amino acids in length, 64 amino acids in length, or 96 amino acids in length.

[0198] In some embodiments, the linker comprises the amino acid sequence (GGGGS)n (SEQ ID NO: 3744), (G)n (SEQ ID NO: 3745), (EAAAK)n (SEQ ID NO: 3746), (GGS)n (SEQ ID NO: 3747), (SGGS)n (SEQ ID NO: 3748), (XP)n (SEQ ID NO: 3749), or any combination thereof, wherein n is independently an integer between 1 and 30, and wherein X is any amino acid. In some embodiments, the linker comprises the amino acid sequence (GGS)n (SEQ ID NO: 3747), wherein n is 1, 3, or 7. In some embodiments, the linker comprises the amino acid sequence SGSETPGTSESATPES (SEQ ID NO: 3750). In some embodiments, the linker comprises the amino acid sequence SGGSSGGSSGSETPGTSESATPESSGGSSGGS (SEQ ID NO: 3751). In some embodiments, the linker comprises the amino acid sequence SGGSGGSGGS (SEQ ID NO: 3752). In some embodiments, the linker comprises the amino acid sequence SGGS (SEQ ID NO: 3753). In other embodiments, the linker comprises the amino acid sequence

(SEQ ID NO: 3754)
SGGSSGGSSGSETPGTSESATPESAGSYPYDVPDYAGSAAPAAKKKKLD
GSGSGGSSGGS.

[0199] In some embodiments, a linker comprises 1-100 amino acids. In some embodiments, the linker comprises the amino acid sequence SGSETPGTSESATPES (SEQ ID NO: 3750). In some embodiments, the linker comprises the amino acid sequence SGGSSGGSSGSETPGTSESATPESSGGSSGGS (SEQ ID NO: 3751). In some embodiments, the linker comprises the amino acid sequence SGGSGGSGGS (SEQ ID NO: 3752). In some embodiments, the linker comprises the amino acid sequence SGGS (SEQ ID NO: 3753). In some embodiments, the linker comprises the amino acid sequence GGSGGS (SEQ ID NO: 3755), GGSGGSGGS (SEQ ID NO: 3756); SGGSSGGSSGSETPGTSESATPESAGSYPYDVPDYAGSAAPAAKKKKLDGSGSGGSSGGS (SEQ ID NO: 3754), or SGGSSGGSSGSETPGTSESATPESSGGSSGGSS (SEQ ID NO: 3757). In some embodiments, the linker comprises the sequence SGGSSGGSSGSETPGTSESATPESSGGSSGGSS (SEQ ID NO: 3757).

[0200] In certain embodiments, two or more components of a prime editor are linked to each other by a non-peptide linker. In some embodiments, the linker is a carbon-nitrogen bond of an amide linkage. In certain embodiments, the linker is a cyclic or acyclic, substituted or unsubstituted, branched or unbranched aliphatic or heteroaliphatic linker. In certain embodiments, the linker is polymeric (e.g., polyethylene, polyethylene glycol, polyamide, polyester, etc.). In certain embodiments, the linker comprises a monomer, dimer, or polymer of aminoalkanoic acid. In certain embodiments, the linker comprises an aminoalkanoic acid (e.g., glycine, ethanoic acid, alanine, beta-alanine, 3-aminopropanoic acid, 4-aminobutanoic acid, 5-pentanoic acid, etc.). In certain embodiments, the linker comprises a monomer, dimer, or polymer of aminohexanoic acid (Ahx). In certain embodiments, the linker is based on a carbocyclic moiety (e.g., cyclopentane, cyclohexane). In other embodiments, the linker comprises a polyethylene glycol moiety (PEG). In certain embodiments, the linker comprises an aryl or heteroaryl moiety. In certain embodiments, the linker is based on a phenyl ring. The linker may include functionalized moieties to facilitate attachment of a nucleophile (e.g., thiol, amino) from the peptide to the linker. Any electrophile may be used as part of the linker. Exemplary electrophiles include, but are not limited to, activated esters, activated amides, Michael acceptors, alkyl halides, aryl halides, acyl halides, and isothiocyanates.

[0201] Components of a prime editor may be connected to each other in any order. In some embodiments, the DNA binding domain and the DNA polymerase domain of a prime editor may be fused to form a fusion protein, or may be joined by a peptide or protein linker, in any order from the N terminus to the C terminus. In some embodiments, a prime editor comprises a DNA binding domain fused or linked to the C-terminal end of a DNA polymerase domain. In some embodiments, a prime editor comprises a DNA binding domain fused or linked to the N-terminal end of a DNA polymerase domain. In some embodiments, the prime editor comprises a fusion protein comprising the structure NH2-[DNA binding domain]-[polymerase]-COGH; or NH2-[polymerase]-[DNA binding domain]-COGH, wherein each instance of “]-[” indicates the presence of an optional linker sequence. In some embodiments, a prime editor comprises a fusion protein and a DNA polymerase domain provided in trans, wherein the fusion protein comprises the structure NH2-[DNA binding domain]-[RNA-protein recruitment polypeptide]-COGH. In some embodiments, a prime editor comprises a fusion protein and a DNA binding domain provided in trans, wherein the fusion protein comprises the structure NH2-[DNA polymerase domain]-[RNA-protein recruitment polypeptide]-COGH.

[0202] In some embodiments, a prime editor fusion protein, a polypeptide component of a prime editor, or a polynucleotide encoding the prime editor fusion protein or polypeptide component, may be split into an N-terminal half and a C-terminal half or polypeptides that encode the N-terminal half and the C terminal half, and provided to a target DNA in a cell separately. For example, in certain embodiments, a prime editor fusion protein may be split into a N-terminal and a C-terminal half for separate delivery in AAV vectors, and subsequently translated and colocalized in a target cell to reform the complete polypeptide or prime editor protein. In such cases, separate halves of a protein or a fusion protein may each comprise a split-intein to facilitate colocalization and reformation of the complete protein or fusion protein by the mechanism of intein facilitated trans splicing. In some embodiments, a prime editor comprises a N-terminal half fused to an intein-N, and a C-terminal half fused to an intein-C, or polynucleotides or vectors (e.g. AAV vectors) encoding each thereof. When delivered and/or expressed in a target cell, the intein-N and the intein-C can be excised via protein trans-splicing, resulting in a complete prime editor fusion protein in the target cell.

[0203] In some embodiments, an exemplary protein described herein may lack a methionine residue at the N-terminus. In some embodiments, a prime editor fusion protein comprises a Cas9(H840A) nickase and a wild type M-MLV RT. In some embodiments, a prime editor fusion protein comprises a Cas9(H840A) nickase and a M-MLV RT that comprises amino acid substitutions D200N, T330P, T306K, W313F, and L603W compared to a wild type or reference M-MLV RT. In some embodiments, a prime editor fusion protein comprises a Cas9(H840A) nickase and a M-MLV RT that comprises amino acid substitutions D200N, T330P, T306K, W313F, and L603W compared to a wild type or reference M-MLV RT. The amino acid sequence of an exemplary prime editor fusion protein and its individual components is shown in Table 57.

[0204] In some embodiments, a prime editor fusion protein comprises a Cas9 (R221K N394K H840A) nickase and a M-MLV RT that comprises amino acid substitutions D200N, T330P, T306K, W313F, and L603W compared to a wild type or reference M-MLV RT. The amino acid sequence of an exemplary Prime editor fusion protein and its individual components is shown in Table 58.

[0205] In some embodiments an exemplary prime editor protein may comprise an amino acid sequence as set forth in any of the SEQ ID NO: 3740 or SEQ ID NO: 3741.

[0206] In various embodiments, a prime editor fusion protein comprises an amino acid sequence that is at least about 70% identical, at least about 80% identical, at least about 90% identical, at least about 95% identical, at least about 96% identical, at least about 97% identical, at least about 98% identical, at least about 99% identical, at least about 99.5% identical, or at least about 99.9% identical to PE1, PE2, or any of the prime editor fusion sequences described herein or known in the art.

TABLE 57
lists exemplary prime editor and its components

| SEQ | | |
|---|---|---|
| ID | | |
| NO: | DESCRIPTION | SEQUENCE |
| 3740 | Exemplary Prime | MKRTADGSEFESPKKKRKVDKKYSIGLDIGTNSVGWAVITDEYKVPSKKFKV |
| | Editor [NLS]- | LGNTDRHSIKKNLIGALLFDSGETAEATRLKRTARRRYTRRKNRICYLQEIFSN |
| | [Cas9(H840A)]- | EMAKVDDSFFHRLEESFLVEEDKKHERHPIFGNIVDEVAYHEKYPTIYHLRKK |
| | [linker]- | LVDSTDKADLRLIYLALAHMIKFRGHFLIEGDLNPDNSDVDKLFIQLVQTYN |
| | [MMLV_RT(D200N)(T | QLFEENPINASGVDAKAILSARLSKSRRLENLIAQLPGEKKNGLFGNLIALSLG |
| | 330P)(L603W)(T306K) | LTPNFKSNFDLAEDAKLQLSKDTYDDDLDNLLAQIGDQYADLFLAAKNLSDA |
| | (W313F)]-[NLS] | ILLSDILRVNTEITKAPLSASMIKRYDEHHQDLTLLKALVRQQLPEKYKEIFFD |
| | | QSKNGYAGYIDGGASQEEFYKFIKPILEKMDGTEELLVKLNREDLLRKQRTFD |
| | | NGSIPHQIHLGELHAILRRQEDFYPFLKDNREKIEKILTFRIPYYVGPLARGNS |
| | | RFAWMTRKSEETITPWNFEEVVDKGASAQSFIERMTNFDKNLPNEKVLPK |
| | | HSLLYEYFTVYNELTKVKYVTEGMRKPAFLSGEQKKAIVDLLFKTNRKVTVK |
| | | QLKEDYFKKIECFDSVEISGVEDRFNASLGTYHDLLKIIKDKDFLDNEENEDILE |
| | | DIVLTLTLFEDREMIEERLKTYAHLFDDKVMKQLKRRRYTGWGRLSRKLINGI |
| | | RDKQSGKTILDFLKSDGFANRNFMQLIHDDSLTFKEDIQKAQVSGQGDSLH |
| | | EHIANLAGSPAIKKGILQTVKVVDELVKVMGRHKPENIVIEMARENQTTQK |
| | | GQKNSRERMKRIEEGIKELGSQILKEHPVENTQLQNEKLYLYYLQNGRDMY |
| | | VDQELDINRLSDYDVDAIVPQSFLKDDSIDNKVLTRSDKNRGKSDNVPSEEV |
| | | VKKMKNYWRQLLNAKLITQRKFDNLTKAERGGLSELDKAGFIKRQLVETRQ |
| | | ITKHVAQILDSRMNTKYDENDKLIREVKVITLKSKLVSDFRKDFQFYKVREIN |
| | | NYHHAHDAYLNAVVGTALIKKYPKLESEFVYGDYKVYDVRKMIAKSEQEIG |
| | | KATAKYFFYSNIMNFFKTEITLANGEIRKRPLIETNGETGEIVWDKGRDFATV |
| | | RKVLSMPQVNIVKKTEVQTGGFSKESILPKRNSDKLIARKKDWDPKKYGGF |
| | | DSPTVAYSVLVVAKVEKGKSKKLKSVKELLGITIMERSSFEKNPIDFLEAKGYK |
| | | EVKKDLIIKLPKYSLFELENGRKRMLASAGELQKGNELALPSKYVNFLYLASHY |
| | | EKLKGSPEDNEQKOLFVEQHKHYLDEIIEQISEFSKRVILADANLDKVLSAYN |
| | | KHRDKPIREQAENIIHLFTLTNLGAPAAFKYFDTTIDRKRYTSTKEVLDATLIH |
| | | QSITGLYETRIDLSQLGGDSGGSSGGSSGSETPGTSESATPESSGGSSGGSSTL |
| | | NIEDEYRLHETSKEPDVSLGSTWLSDFPQAWAETGGMGLAVRQAPLIIPLKAT |
| | | STPVSIKQYPMSQEARLGIKPHIQRLLDQGILVPCQSPWNTPLLPVKKPGTND |
| | | YRPVQDLREVNKRVEDIHPTVPNPYNLLSGLPPSHQWYTVLDLKDAFFCLRLH |
| | | PTSQPLFAFEWRDPEMGISGQLTWTRLPQGFKNSPTLFNEALHRDLADFRIQ |
| | | HPDLILLQYVDDLLLAATSELDCQQGTRALLQTLGNLGYRASAKKAQICQKQV |
| | | KYLGYLLKEGQRWLTEARKETVMGQPTPKTPRQLREFLGKAGFCRLFIPGFAE |
| | | MAAPLYPLTKPGTLFNWGPDQQKAYQEIKQALLTAPALGLPDLTKPFELFVDE |
| | | KQGYAKGVLTQKLGPWRRPVAYLSKKLDPVAAGWPPCLRMVAAIAVLTKDA |
| | | GKLTMGQPLVILAPHAVEALVKQPPDRWLSNARMTHYQALLLDTDRVQFGP |
| | | VVALNPATLLPLPEEGLOHNCLDILAEAHGTRPDLTDQPLPDADHTWYTDGS |
| | | SLLQEGQRKAGAAVTTETEVIWAKALPAGTSAQRAELIALTQALKMAEGKKL |
| | | NVYTDSRYAFATAHIHGEIYRRRGWLTSEGKEIKNKDEILALLKALFLPKRLSIIH |
| | | CPGHQKGHSAEARGNRMADQAARKAAITETPDTSTLLIENSSPSGGSKRTAD |
| | | GSEFEPKKKRKV |
| | | KEY: |
| | | NUCLEAR LOCALIZATION SEQUENCE (NLS) |
| | | CAS9(H840A) |
| | | 33-AMINO ACID LINKER |
| | | M-MLV REVERSE TRANSCRIPTASE |
| 3730 | -N-terminal NLS | MKRTADGSEFESPKKKRKV |
| 3695 | -CAS9 (H840A) (MET | DKKYSIGLDIGTNSVGWAVITDEYKVPSKKFKVLGNTDRHSIKKNLIGALLFDS |
| | MINUS) | GETAEATRLKRTARRRYTRRKNRICYLQEIFSNEMAKVDDSFFHRLEESFLVEE |
| | | DKKHERHPIFGNIVDEVAYHEKYPTIYHLRKKLVDSTDKADLRLIYLALAHMIKF |
| | | RGHFLIEGDLNPDNSDVDKLFIQLVQTYNQLFEENPINASGVDAKAILSARLSK |
| | | SRRLENLIAQLPGEKKNGLFGNLIALSLGLTPNFKSNFDLAEDAKLQLSKDTYD |
| | | DDLDNLLAQIGDQYADLFLAAKNLSDAILLSDILRVNTEITKAPLSASMIKRYDE |
| | | HHQDLTLLKALVRQQLPEKYKEIFFDQSKNGYAGYIDGGASQEEFYKFIKPILEK |
| | | MDGTEELLVKLNREDLLRKQRTFDNGSIPHQIHLGELHAILRRQEDFYPFLKDN |
| | | REKIEKILTFRIPYYVGPLARGNSRFAWMTRKSEETITPWNFEEVVDKGASAQS |
| | | FIERMTNFDKNLPNEKVLPKHSLLYEYFTVYNELTKVKYVTEGMRKPAFLSGEQ |
| | | KKAIVDLLFKTNRKVTVKQLKEDYFKKIECFDSVEISGVEDRFNASLGTYHDLLKI |
| | | IKDKDFLDNEENEDILEDIVLTLTLFEDREMIEERLKTYAHLFDDKVMKQLKRRR |
| | | YTGWGRLSRKLINGIRDKQSGKTILDFLKSDGFANRNFMQLIHDDSLTFKEDIQ |
| | | KAQVSGQGDSLHEHIANLAGSPAIKKGILQTVKVVDELVKVMGRHKPENIVIE |
| | | MARENQTTQKGQKNSRERMKRIEEGIKELGSQILKEHPVENTQLQNEKLYLYY |
| | | LONGRDMYVDQELDINRLSDYDVDAIVPQSFLKDDSIDNKVLTRSDKNRGKS |
| | | DNVPSEEVVKKMKNYWRQLLNAKLITQRKFDNLTKAERGGLSELDKAGFIKR |
| | | QLVETRQITKHVAQILDSRMNTKYDENDKLIREVKVITLKSKLVSDFRKDFQFY |
| | | KVREINNYHHAHDAYLNAVVGTALIKKYPKLESEFVYGDYKVYDVRKMIAKSE |
| | | QEIGKATAKYFFYSNIMNFFKTEITLANGEIRKRPLIETNGETGEIVWDKGRDF |
| | | ATVRKVLSMPQVNIVKKTEVQTGGFSKESILPKRNSDKLIARKKDWDPKKYGG |
| | | FDSPTVAYSVLVVAKVEKGKSKKLKSVKELLGITIMERSSFEKNPIDFLEAKGYKE |
| | | VKKDLIIKLPKYSLFELENGRKRMLASAGELQKGNELALPSKYVNFLYLASHYEK |
| | | LKGSPEDNEQKOLFVEQHKHYLDEIIEQISEFSKRVILADANLDKVLSAYNKHR |
| | | DKPIREQAENIIHLFTLTNLGAPAAFKYFDTTIDRKRYTSTKEVLDATLIHQSITG |
| | | LYETRIDLSQLGGD |
| 3757 | -linker between | SGGSSGGSSGSETPGTSESATPESSGGSSGGSS |
| | CAS9 domain and RT | |
| | domain (33 amino | |
| | acids) | |
| 3692 | -MMLV_RT D200N | TLNIEDEYRLHETSKEPDVSLGSTWLSDFPQAWAETGGMGLAVRQAPLIIPLK |
| | T330P L603W T306K | ATSTPVSIKQYPMSQEARLGIKPHIQRLLDQGILVPCQSPWNTPLLPVKKPGT |
| | W313F | NDYRPVQDLREVNKRVEDIHPTVPNPYNLLSGLPPSHQWYTVLDLKDAFFCL |
| | | RLHPTSQPLFAFEWRDPEMGISGQLTWTRLPQGFKNSPTLFNEALHRDLADF |
| | | RIQHPDLILLQYVDDLLLAATSELDCQQGTRALLQTLGNLGYRASAKKAQICQK |
| | | QVKYLGYLLKEGQRWLTEARKETVMGQPTPKTPROLREFLGKAGFCRLFIPGF |
| | | AEMAAPLYPLTKPGTLFNWGPDQQKAYQEIKQALLTAPALGLPDLTKPFELFV |
| | | DEKQGYAKGVLTQKLGPWRRPVAYLSKKLDPVAAGWPPCLRMVAAIAVLTK |
| | | DAGKLTMGQPLVILAPHAVEALVKQPPDRWLSNARMTHYQALLLDTDRVQF |
| | | GPVVALNPATLLPLPEEGLOHNCLDILAEAHGTRPDLTDQPLPDADHTWYTD |
| | | GSSLLQEGQRKAGAAVTTETEVIWAKALPAGTSAQRAELIALTQALKMAEGKK |
| | | LNVYTDSRYAFATAHIHGEIYRRRGWLTSEGKEIKNKDEILALLKALFLPKRLSII |
| | | HCPGHQKGHSAEARGNRMADQAARKAAITETPDTSTLLIENSSP |
| 3739 | -C-terminal NLS | SGGSKRTADGSEFEPKKKRKV |

TABLE 58
lists exemplary prime editor and its components

| SEQ | | |
|---|---|---|
| ID NO. | DESCRIPTION | SEQUENCE |
| 3741 | Exemplary prime | MKRTADGSEFESPKKKRKVDKKYSIGLDIGTNSVGWAVITDEYKVPSKKFKVL |
| | editor [NLS]- | GNTDRHSIKKNLIGALLFDSGETAEATRLKRTARRRYTRRKNRICYLQEIFSNE |
| | [Cas9((R220K) | MAKVDDSFFHRLEESFLVEEDKKHERHPIFGNIVDEVAYHEKYPTIYHLRKKL |
| | (R393K) (H839A)]- | VDSTDKADLRLIYLALAHMIKFRGHFLIEGDLNPDNSDVDKLFIQLVQTYNQL |
| | [linker]- | FEENPINASGVDAKAILSARLSKSRKLENLIAQLPGEKKNGLFGNLIALSLGLTP |
| | [MMLV_RT(D200N)(T | NFKSNFDLAEDAKLQLSKDTYDDDLDNLLAQIGDQYADLFLAAKNLSDAILL |
| | 330P)(L603W)(T306K) | SDILRVNTEITKAPLSASMIKRYDEHHQDLTLLKALVRQQLPEKYKEIFFDQSK |
| | (W313F)]-[NLS] | NGYAGYIDGGASQEEFYKFIKPILEKMDGTEELLVKLKREDLLRKORTFDNGS |
| | | IPHQIHLGELHAILRRQEDFYPFLKDNREKIEKILTFRIPYYVGPLARGNSRFA |
| | | WMTRKSEETITPWNFEEVVDKGASAQSFIERMTNFDKNLPNEKVLPKHSLL |
| | | YEYFTVYNELTKVKYVTEGMRKPAFLSGEQKKAIVDLLFKTNRKVTVKQLKE |
| | | DYFKKIECFDSVEISGVEDRFNASLGTYHDLLKIIKDKDFLDNEENEDILEDIVL |
| | | TLTLFEDREMIEERLKTYAHLFDDKVMKQLKRRRYTGWGRLSRKLINGIRDK |
| | | QSGKTILDFLKSDGFANRNFMQLIHDDSLTFKEDIQKAQVSGQGDSLHEHIA |
| | | NLAGSPAIKKGILQTVKVVDELVKVMGRHKPENIVIEMARENQTTQKGQK |
| | | NSRERMKRIEEGIKELGSQILKEHPVENTQLQNEKLYLYYLQNGRDMYVDQ |
| | | ELDINRLSDYDVDAIVPQSFLKDDSIDNKVLTRSDKNRGKSDNVPSEEVVKK |
| | | MKNYWRQLLNAKLITQRKFDNLTKAERGGLSELDKAGFIKRQLVETRQITKH |
| | | VAQILDSRMNTKYDENDKLIREVKVITLKSKLVSDFRKDFQFYKVREINNYHH |
| | | AHDAYLNAVVGTALIKKYPKLESEFVYGDYKVYDVRKMIAKSEQEIGKATAK |
| | | YFFYSNIMNFFKTEITLANGEIRKRPLIETNGETGEIVWDKGRDFATVRKVLS |
| | | MPQVNIVKKTEVQTGGFSKESILPKRNSDKLIARKKDWDPKKYGGFDSPTV |
| | | AYSVLVVAKVEKGKSKKLKSVKELLGITIMERSSFEKNPIDFLEAKGYKEVKKD |
| | | LIIKLPKYSLFELENGRKRMLASAGELQKGNELALPSKYVNFLYLASHYEKLKG |
| | | SPEDNEQKQLFVEQHKHYLDEIIEQISEFSKRVILADANLDKVLSAYNKHRDK |
| | | PIREQAENIIHLFTLTNLGAPAAFKYFDTTIDRKRYTSTKEVLDATLIHQSITGL |
| | | YETRIDLSQLGGDSGGSSGGSKRTADGSEFESPKKKRKVSGGSSGGSTLNIED |
| | | EYRLHETSKEPDVSLGSTWLSDFPQAWAETGGMGLAVRQAPLIIPLKATSTPV |
| | | SIKQYPMSQEARLGIKPHIQRLLDQGILVPCQSPWNTPLLPVKKPGTNDYRPV |
| | | QDLREVNKRVEDIHPTVPNPYNLLSGLPPSHQWYTVLDLKDAFFCLRLHPTSQ |
| | | PLFAFEWRDPEMGISGQLTWTRLPQGFKNSPTLFNEALHRDLADFRIQHPDLI |
| | | LLQYVDDLLLAATSELDCQQGTRALLQTLGNLGYRASAKKAQICQKQVKYLGY |
| | | LLKEGQRWLTEARKETVMGQPTPKTPRQLREFLGKAGFCRLFIPGFAEMAAP |
| | | LYPLTKPGTLFNWGPDQQKAYQEIKQALLTAPALGLPDLTKPFELFVDEKQGY |
| | | AKGVLTQKLGPWRRPVAYLSKKLDPVAAGWPPCLRMVAAIAVLTKDAGKLT |
| | | MGQPLVILAPHAVEALVKQPPDRWLSNARMTHYQALLLDTDRVQFGPVVAL |
| | | NPATLLPLPEEGLQHNCLDILAEAHGTRPDLTDQPLPDADHTWYTDGSSLLQE |
| | | GQRKAGAAVTTETEVIWAKALPAGTSAQRAELIALTQALKMAEGKKLNVYTD |
| | | SRYAFATAHIHGEIYRRRGWLTSEGKEIKNKDEILALLKALFLPKRLSIIHCPGHQ |
| | | KGHSAEARGNRMADQAARKAAITETPDTSTLLIENSSPSGGSKRTADGSEFES |
| | | PKKKRKVGSGPAAKRVKLD |
| | | KEY: |
| | | N-terminal bipartiteSV40NLS |
| | | CAS9(R221K N394K H840A) |
| | | SGGSx2-met-bpSV40NLS-SGGSx2 LINKER |
| | | M-MLV D200N T306K W313F T330P L603W REVERSE TRANSCRIPTASE |
| | | C-terminal linker-NLS1 |
| | | C-terminal linker-NLS2 |
| 3730 | -N-terminal | MKRTADGSEFESPKKKRKV |
| | bpSV40NLS | |
| 3696 | -CAS9 (R221K | DKKYSIGLDIGTNSVGWAVITDEYKVPSKKFKVLGNTDRHSIKKNLIGALLFDSG |
| | N394K H840A) | ETAEATRLKRTARRRYTRRKNRICYLQEIFSNEMAKVDDSFFHRLEESFLVEEDK |
| | | KHERHPIFGNIVDEVAYHEKYPTIYHLRKKLVDSTDKADLRLIYLALAHMIKFRG |
| | | HFLIEGDLNPDNSDVDKLFIQLVQTYNQLFEENPINASGVDAKAILSARLSKSRK |
| | | LENLIAQLPGEKKNGLFGNLIALSLGLTPNFKSNFDLAEDAKLQLSKDTYDDDL |
| | | DNLLAQIGDQYADLFLAAKNLSDAILLSDILRVNTEITKAPLSASMIKRYDEHHQ |
| | | DLTLLKALVRQQLPEKYKEIFFDQSKNGYAGYIDGGASQEEFYKFIKPILEKMDG |
| | | TEELLVKLKREDLLRKQRTFDNGSIPHQIHLGELHAILRRQEDFYPFLKDNREKIE |
| | | KILTFRIPYYVGPLARGNSRFAWMTRKSEETITPWNFEEVVDKGASAQSFIER |
| | | MTNFDKNLPNEKVLPKHSLLYEYFTVYNELTKVKYVTEGMRKPAFLSGEQKKA |
| | | IVDLLFKTNRKVTVKQLKEDYFKKIECFDSVEISGVEDRFNASLGTYHDLLKIIKD |
| | | KDFLDNEENEDILEDIVLTLTLFEDREMIEERLKTYAHLFDDKVMKOLKRRRYT |
| | | GWGRLSRKLINGIRDKQSGKTILDFLKSDGFANRNFMQLIHDDSLTFKEDIQK |
| | | AQVSGQGDSLHEHIANLAGSPAIKKGILQTVKVVDELVKVMGRHKPENIVIEM |
| | | ARENQTTQKGQKNSRERMKRIEEGIKELGSQILKEHPVENTQLQNEKLYLYYL |
| | | QNGRDMYVDQELDINRLSDYDVDAIVPQSFLKDDSIDNKVLTRSDKNRGKSD |
| | | NVPSEEVVKKMKNYWRQLLNAKLITQRKFDNLTKAERGGLSELDKAGFIKRQL |
| | | VETRQITKHVAQILDSRMNTKYDENDKLIREVKVITLKSKLVSDFRKDFQFYKV |
| | | REINNYHHAHDAYLNAVVGTALIKKYPKLESEFVYGDYKVYDVRKMIAKSEQEI |
| | | GKATAKYFFYSNIMNFFKTEITLANGEIRKRPLIETNGETGEIVWDKGRDFATV |
| | | RKVLSMPQVNIVKKTEVQTGGFSKESILPKRNSDKLIARKKDWDPKKYGGFDS |
| | | PTVAYSVLVVAKVEKGKSKKLKSVKELLGITIMERSSFEKNPIDFLEAKGYKEVKK |
| | | DLIIKLPKYSLFELENGRKRMLASAGELQKGNELALPSKYVNFLYLASHYEKLKG |
| | | SPEDNEQKOLFVEQHKHYLDEIIEQISEFSKRVILADANLDKVLSAYNKHRDKPI |
| | | REQAENIIHLFTLTNLGAPAAFKYFDTTIDRKRYTSTKEVLDATLIHQSITGLYET |
| | | RIDLSQLGGD |
| 3758 | -SGGSx2- | SGGSSGGSKRTADGSEFESPKKKRKVSGGSSGGS |
| | bpSV40NLS-SGGSx2 | |
| | linker | |
| 3692 | -MMLV_RT D200N | TLNIEDEYRLHETSKEPDVSLGSTWLSDFPQAWAETGGMGLAVRQAPLIIPLK |
| | T330P L603W T306K | ATSTPVSIKQYPMSQEARLGIKPHIQRLLDQGILVPCQSPWNTPLLPVKKPGT |
| | W313F | NDYRPVQDLREVNKRVEDIHPTVPNPYNLLSGLPPSHQWYTVLDLKDAFFCLR |
| | | LHPTSQPLFAFEWRDPEMGISGQLTWTRLPQGFKNSPTLFNEALHRDLADFRI |
| | | QHPDLILLQYVDDLLLAATSELDCQQGTRALLQTLGNLGYRASAKKAQICQKQ |
| | | VKYLGYLLKEGQRWLTEARKETVMGQPTPKTPRQLREFLGKAGFCRLFIPGFA |
| | | EMAAPLYPLTKPGTLFNWGPDQQKAYQEIKQALLTAPALGLPDLTKPFELFVD |
| | | EKQGYAKGVLTQKLGPWRRPVAYLSKKLDPVAAGWPPCLRMVAAIAVLTKD |
| | | AGKLTMGQPLVILAPHAVEALVKQPPDRWLSNARMTHYQALLLDTDRVQFG |
| | | PVVALNPATLLPLPEEGLOHNCLDILAEAHGTRPDLTDQPLPDADHTWYTDG |
| | | SSLLQEGQRKAGAAVTTETEVIWAKALPAGTSAQRAELIALTQALKMAEGKKL |
| | | NVYTDSRYAFATAHIHGEIYRRRGWLTSEGKEIKNKDEILALLKALFLPKRLSIIH |
| | | CPGHQKGHSAEARGNRMADQAARKAAITETPDTSTLLIENSSP |
| 3759 | C-terminal linker-NLS | SGGSKRTADGSEFESPKKKRKV |
| 3760 | C-terminal linker- | GSGPAAKRVKLD |
| | NLS2 | |

### PEgRNA for Editing of FANCC Gene

[0207] The term “prime editing guide RNA”, or “PEgRNA”, refers to a guide polynucleotide that comprises one or more intended nucleotide edits for incorporation into the target DNA. In some embodiments, the PEgRNA associates with and directs a prime editor to incorporate the one or more intended nucleotide edits into the target gene via prime editing. “Nucleotide edit” or “intended nucleotide edit” refers to a specified deletion of one or more nucleotides at one specific position, insertion of one or more nucleotides at one specific position, substitution of a single nucleotide, or other alterations at one specific position to be incorporated into the sequence of the target gene. Intended nucleotide edit may refer to the edit on the editing template as compared to the sequence on the target strand of the target gene, or may refer to the edit encoded by the editing template on the newly synthesized single stranded DNA that replaces the editing target sequence, as compared to the editing target sequence. In some embodiments, a PEgRNA comprises a spacer sequence that is complementary or substantially complementary to a search target sequence on a target strand of the target gene. In some embodiments, the PEgRNA comprises a gRNA core that associates with a DNA binding domain, e.g., a CRISPR-Cas protein domain, of a prime editor. In some embodiments, the PEgRNA further comprises an extended nucleotide sequence comprising one or more intended nucleotide edits compared to the endogenous sequence of the target gene, wherein the extended nucleotide sequence can be referred to as an extension arm.

[0208] In certain embodiments, the extension arm comprises a primer binding site sequence (PBS) that can initiate target-primed DNA synthesis. In some embodiments, the PBS is complementary or substantially complementary to a free 3′ end on the edit strand of the target gene at a nick site generated by the prime editor. In some embodiments, the extension arm further comprises an editing template that comprises one or more intended nucleotide edits to be incorporated in the target gene by prime editing. In some embodiments, the editing template is a template for an RNA-dependent DNA polymerase domain or polypeptide of the prime editor, for example, a reverse transcriptase domain. The reverse transcriptase editing template may also be referred to herein as an RT template, or RTT. In some embodiments, the editing template comprises partial complementarity to an editing target sequence in the target gene, e.g., an FANCC gene. In some embodiments, the editing template comprises substantial or partial complementarity to the editing target sequence except at the position of the intended nucleotide edits to be incorporated into the target gene. An exemplary architecture of a PEgRNA including its components is as demonstrated in FIG. 2.

[0209] In some embodiments, a PEgRNA includes only RNA nucleotides and forms an RNA polynucleotide. In some embodiments, a PEgRNA is a chimeric polynucleotide that includes both RNA and DNA nucleotides. For example, a PEgRNA can include DNA in the spacer sequence, the gRNA core, or the extension arm. In some embodiments, a PEgRNA comprises DNA in the spacer sequence. In some embodiments, the entire spacer sequence of a PEgRNA is a DNA sequence. In some embodiments, the PEgRNA comprises DNA in the gRNA core, for example, in a stem region of the gRNA core. In some embodiments, the PEgRNA comprises DNA in the extension arm, for example, in the editing template. An editing template that comprises a DNA sequence may serve as a DNA synthesis template for a DNA polymerase in a prime editor, for example, a DNA-dependent DNA polymerase. Accordingly, the PEgRNA may be a chimeric polynucleotide that comprises RNA in the spacer, gRNA core, and/or the PBS sequences and DNA in the editing template.

[0210] Components of a PEgRNA may be arranged in a modular fashion. In some embodiments, the spacer and the extension arm comprising a primer binding site sequence (PBS) and an editing template, e.g., a reverse transcriptase template (RTT), can be interchangeably located in the 5′ portion of the PEgRNA, the 3′ portion of the PEgRNA, or in the middle of the gRNA core. In some embodiments, a PEgRNA comprises a PBS and an editing template sequence in 5′ to 3′ order. In some embodiments, the gRNA core of a PEgRNA of this disclosure may be located in between a spacer and an extension arm of the PEgRNA. In some embodiments, the gRNA core of a PEgRNA may be located at the 3′ end of a spacer. In some embodiments, the gRNA core of a PEgRNA may be located at the 5′ end of a spacer. In some embodiments, the gRNA core of a PEgRNA may be located at the 3′ end of an extension arm. In some embodiments, the gRNA core of a PEgRNA may be located at the 5′ end of an extension arm. In some embodiments, the PEgRNA comprises, from 5′ to 3′: a spacer, a gRNA core, and an extension arm. In some embodiments, the PEgRNA comprises, from 5′ to 3′: a spacer, a gRNA core, an editing template, and a PBS. In some embodiments, the PEgRNA comprises, from 5′ to 3′: an extension arm, a spacer, and a gRNA core. In some embodiments, the PEgRNA comprises, from 5′ to 3′: an editing target, a PBS, a spacer, and a gRNA core.

[0211] In some embodiments, a PEgRNA comprises a single polynucleotide molecule that comprises the spacer sequence, the gRNA core, and the extension arm. In some embodiments, a PEgRNA comprises multiple polynucleotide molecules, for example, two polynucleotide molecules. In some embodiments, a PEgRNA comprise a first polynucleotide molecule that comprises the spacer and a portion of the gRNA core, and a second polynucleotide molecule that comprises the rest of the gRNA core and the extension arm. In some embodiments, the gRNA core portion in the first polynucleotide molecule and the gRNA core portion in the second polynucleotide molecule are at least partly complementary to each other. In some embodiments, the PEgRNA can comprise a first polynucleotide comprising the spacer and a first portion of a gRNA core comprising, which can be also be referred to as a crRNA. In some embodiments, the PEgRNA comprise a second polynucleotide comprising a second portion of the gRNA core and the extension arm, wherein the second portion of the gRNA core may also be referred to as a trans-activating crRNA, or tracr RNA. In some embodiments, the crRNA portion and the tracr RNA portion of the gRNA core are at least partially complementary to each other. In some embodiments, the partially complementary portions of the crRNA and the tracr RNA form a lower stem, a bulge, and an upper stem, as exemplified in FIG. 3.

[0212] In some embodiments, a spacer sequence comprises a region that has substantial complementarity to a search target sequence on the target strand of a double stranded target DNA, e.g. an FANCC gene. In some embodiments, the spacer sequence of a PEgRNA is identical or substantially identical to a protospacer sequence on the edit strand of the target gene (except that the protospacer sequence comprises thymine and the spacer sequence may comprise uracil). In some embodiments, the spacer sequence is at least about 70%, 75%, 80%, 85%, 90%, 95%, or 100% complementary to a search target sequence in the target gene. In some embodiments, the spacer comprises is substantially complementary to the search target sequence.

[0213] In some embodiments, the length of the spacer varies from about 10 to about 100 nucleotides. In some embodiments, the spacer is 16 nucleotides, 17 nucleotides, 18 nucleotides, 19 nucleotides, 20 nucleotides, 21 nucleotides, 22 nucleotides, 23 nucleotides, 24 nucleotides, or 25 nucleotides in length. In some embodiments, the spacer is from 15 nucleotides to 30 nucleotides in length, 15 to 25 nucleotides in length, 18 to 22 nucleotides in length, 10 to 20 nucleotides in length, or 20 to 30 nucleotides in length. In some embodiments, the spacer is 16 to 22 nucleotides in length, e.g., about 16, 17, 18, 19, 20, 21, or 22 nucleotides in length.

[0214] As used herein in a PEgRNA or a nick guide RNA sequence, or fragments thereof such as a spacer, PBS, or RTT sequence, unless indicated otherwise, it should be appreciated that the letter “T” or “thymine” indicates a nucleobase in a DNA sequence that encodes the PEgRNA or guide RNA sequence, and is intended to refer to a uracil (U) nucleobase of the PEgRNA or guide RNA or any chemically modified uracil nucleobase known in the art, such as 5-methoxyuracil.

[0215] The extension arm of a PEgRNA can comprise a primer binding site (PBS) and an editing template (e.g., an RTT). The extension arm may be partially complementary to the spacer. In some embodiments, the editing template (e.g., RTT) is partially complementary to the spacer. In some embodiments, the editing template (e.g., RTT) and the primer binding site (PBS) are each partially complementary to the spacer.

[0216] An extension arm of a PEgRNA can comprise a primer binding site sequence (PBS, or PBS sequence) that comprises complementarity to and can hybridize with a free 3′ end of a single stranded DNA in the target gene (e.g. FANCC gene) generated by nicking with a prime editor at the nick site on the PAM strand.

[0217] The length of the PBS sequence may vary depending on, e.g., the prime editor components, the search target sequence and other components of the PEgRNA.

[0218] In some embodiments, the PBS is about 3 to 19 nucleotides in length nucleotides in length. In some embodiments, the PBS is about 3 to 17 nucleotides in length. In some embodiments, the PBS is about 4 to 16 nucleotides, about 6 to 16 nucleotides, about 6 to 18 nucleotides, about 6 to 20 nucleotides, about 8 to 20 nucleotides, about 10 to 20 nucleotides, about 12 to 20 nucleotides, about 14 to 20 nucleotides, about 16 to 20 nucleotides, or about 18 to 20 nucleotides in length. In some embodiments, the PBS is 8 to 17 nucleotides in length. In some embodiments, the PBS is 8 to 16 nucleotides in length. In some embodiments, the PBS is 8 to 15 nucleotides in length. In some embodiments, the PBS is 8 to 14 nucleotides in length. In some embodiments, the PBS is 8 to 13 nucleotides in length. In some embodiments, the PBS is 8 to 12 nucleotides in length. In some embodiments, the PBS is 8 to 11 nucleotides in length. In some embodiments, the PBS is 8 to 10 nucleotides in length. In some embodiments, the PBS is 8 or 9 nucleotides in length. In some embodiments, the PBS is 16 or 17 nucleotides in length. In some embodiments, the PBS is 15 to 17 nucleotides in length. In some embodiments, the PBS is 14 to 17 nucleotides in length. In some embodiments, the PBS is 13 to 17 nucleotides in length. In some embodiments, the PBS is 12 to 17 nucleotides in length. In some embodiments, the PBS is 11 to 17 nucleotides in length. In some embodiments, the PBS is 10 to 17 nucleotides in length. In some embodiments, the PBS is 9 to 17 nucleotides in length. In some embodiments, the PBS is about 7 to 15 nucleotides in length. In some embodiments, the PBS is 6, 7, 8, 9, 10, 11, 12, 13, 14, 15, 16, 17, 18, or 19 nucleotides in length. In some embodiments, the PBS is 8 to 14 nucleotides in length. For example, the PBS can be 8, 9, 10, 11, 12, 13, or 14 nucleotides in length. In some embodiments, the PBS is 11 or 12 nucleotides in length. In some embodiments, the PBS is 11 to 13 nucleotides in length. In some embodiments, the PBS is 11 to 14 nucleotides in length.

[0219] The PBS can be complementary or substantially complementary to a DNA sequence in the edit strand of the target gene. By annealing with the edit strand at a free hydroxy group, e.g. a free 3′ end generated by prime editor nicking, the PBS can initiate synthesis of a new single stranded DNA encoded by the editing template at the nick site. In some embodiments, the PBS is at least about 70%, 75%, 80%, 85%, 90%, 95%, or 100% complementary to a region of the edit strand of the target gene (e.g., the FANCC gene). In some embodiments, the PBS is perfectly complementary, or 100% complementary, to a region of the edit strand of the target gene (e.g., the FANCC gene).

[0220] An extension arm of a PEgRNA may comprise an editing template that serves as a DNA synthesis template for the DNA polymerase in a prime editor during prime editing.

[0221] The length of an editing template can vary depending on, e.g., the prime editor components, the search target sequence and other components of the PEgRNA. In some embodiments, the editing template serves as a DNA synthesis template for a reverse transcriptase, and the editing template is referred to as a reverse transcription editing template (RTT).

[0222] The editing template (e.g., RTT), in some embodiments, is 2, 3, 4, 5, 6, 7, 8, 9, 10, 11, 12, 13, 14, 15, 16, 17, 18, 19, 20, 21, 22, 23, 24, or 25 nucleotides in length. In some embodiments, the RTT is 12, 13, 14, 15, 16, 17, 18, 19, 20, 21, 22, 23, 24, or 25 nucleotides in length. In some embodiments, the RTT is 16, 17, 18, 19, 20, 21, 22, 23, 24, 25, 26, 27, 28, 29, 30, 31, 32, 33, 34, 35, 36, 37, 38, 39, or 40 nucleotides in length. In some embodiments, the RTT is 16, 17, 18, 19, 20, 21, 22, 23, 24, 25, 26, 27, 28, 29, 30, 31, 32, 33, 34, 35, 36, 37, 38, 39, 40, 41, 42, 43, 44, 45, 46, 47, 48, 49, 50, 51, 52, 53, 54, 55, 56, 57, 58, 59, 60, 61, 62, 63, 64, 65, 66, 67, 68, 69, 70, 71, 72, 73, 74, 75, 76, 77, 78, 79, or 80 nucleotides in length. In some embodiments, the RTT is 10 to 110 nucleotides in length. In some embodiments, the RTT is 10 to 109, 10 to 108, 10 to 107, 10 to 106, 10 to 105, 10 to 104, 10 to 103, 10 to 102, or 10 to 101 nucleotides in length. In some embodiments, the RTT is at least 8 and no more than 50 nucleotides in length. In some embodiments, the RTT is at least 8 and no more than 25 nucleotides in length. In some embodiments, the RTT is about 10 to about 20 nucleotides in length. In some embodiments, the RTT is about 11, 12, 13, 14, 15, 16, 17, 18, or 19 nucleotides in length. In some embodiments, the RTT is 11 to 17 nucleotides in length. In some embodiments, the RTT is 12 to 17 nucleotides in length. In some embodiments, the RTT is 12 to 16 nucleotides in length. In some embodiments, the RTT is 13 to 17 nucleotides in length. In some embodiments, the RTT is 11, 12, 13, 14, 15, 16, or 17 nucleotides in length. In some embodiments the RTT is 12 nucleotides in length. In some embodiments the RTT is 16 nucleotides in length. In some embodiments the RTT is 17 nucleotides in length.

[0223] In some embodiments, the editing template (e.g., RTT) sequence is about 70%, 75%, 80%, 85%, 90%, 95%, or 99% complementary to the editing target sequence on the edit strand of the target gene. In some embodiments, the editing template sequence (e.g., RTT) is substantially complementary to the editing target sequence. In some embodiments, the editing template sequence (e.g., RTT) is complementary to the editing target sequence except at positions of the intended nucleotide edits to be incorporated in the target gene. In some embodiments, the editing template comprises a nucleotide sequence comprising about 85% to about 95% complementarity to an editing target sequence in the edit strand in the target gene (e.g. FANCC gene). In some embodiments, the editing template comprises about 86%, about 87%, about 88%, about 89%, about 90%, about 91%, about 92%, about 93%, about 94%, about 95%, about 96%, about 97%, about 98%, or about 99% complementarity to an editing target sequence in the edit strand of the target gene (e.g., the FANCC gene).

[0224] An intended nucleotide edit in an editing template of a PEgRNA may comprise various types of alterations as compared to the target gene sequence. In some embodiments, the nucleotide edit is a single nucleotide substitution as compared to the target gene sequence. In some embodiments, the nucleotide edit is a deletion as compared to the target gene sequence. In some embodiments, the nucleotide edit is an insertion as compared to the target gene sequence. In some embodiments, the editing template comprises one to ten intended nucleotide edits as compared to the target gene sequence. In some embodiments, the editing template comprises one or more intended nucleotide edits as compared to the target gene sequence. In some embodiments, the editing template comprises two or more intended nucleotide edits as compared to the target gene sequence. In some embodiments, the editing template comprises three or more intended nucleotide edits as compared to the target gene sequence. In some embodiments, the editing template comprises four or more, five or more, or six or more intended nucleotide edits as compared to the target gene sequence. In some embodiments, the editing template comprises two single nucleotide substitutions, insertions, deletions, or any combination thereof, as compared to the target gene sequence. In some embodiments, the editing template comprises three single nucleotide substitutions, insertions, deletions, or any combination thereof, as compared to the target gene sequence. In some embodiments, the editing template comprises four, five, or six single nucleotide substitutions, insertions, deletions, or any combination thereof, as compared to the target gene sequence. In some embodiments, a nucleotide substitution comprises an adenine (A)-to-thymine (T) substitution. In some embodiments, a nucleotide substitution comprises an A-to-guanine (G) substitution. In some embodiments, a nucleotide substitution comprises an A-to-cytosine (C) substitution. In some embodiments, a nucleotide substitution comprises a T-A substitution. In some embodiments, a nucleotide substitution comprises a T-G substitution. In some embodiments, a nucleotide substitution comprises a T-C substitution. In some embodiments, a nucleotide substitution comprises a G-to-A substitution. In some embodiments, a nucleotide substitution comprises a G-to-T substitution. In some embodiments, a nucleotide substitution comprises a G-to-C substitution. In some embodiments, a nucleotide substitution comprises a C-to-A substitution. In some embodiments, a nucleotide substitution comprises a C-to-T substitution. In some embodiments, a nucleotide substitution comprises a C-to-G substitution.

[0225] In some embodiments, a nucleotide insertion is at least 1, at least 2, at least 3, at least 4, at least 5 nucleotides, at least 6 nucleotides, at least 7 nucleotides, at least 8 nucleotides, at least 9 nucleotides, at least 10 nucleotides, at least 11 nucleotides, at least 12 nucleotides, at least 13 nucleotides, at least 14 nucleotides, at least 15 nucleotides, at least 16 nucleotides, at least 17 nucleotides, at least 18 nucleotides, at least 19 nucleotides, or at least 20 nucleotides in length. In some embodiments, a nucleotide insertion is from 1 to 2 nucleotides, from 1 to 3 nucleotides, from 1 to 4 nucleotides, from 1 to 5 nucleotides, form 2 to 5 nucleotides, from 3 to 5 nucleotides, from 3 to 6 nucleotides, from 3 to 8 nucleotides, from 4 to 9 nucleotides, from 5 to 10 nucleotides, from 6 to 11 nucleotides, from 7 to 12 nucleotides, from 8 to 13 nucleotides, from 9 to 14 nucleotides, from 10 to 15 nucleotides, from 11 to 16 nucleotides, from 12 to 17 nucleotides, from 13 to 18 nucleotides, from 14 to 19 nucleotides, from 15 to 20 nucleotides in length. In some embodiments, a nucleotide insertion is a single nucleotide insertion. In some embodiments, a nucleotide insertion comprises insertion of two nucleotides.

[0226] The editing template of a PEgRNA can comprise one or more intended nucleotide edits, compared to the FANCC gene to be edited. Position of the intended nucleotide edit(s) relevant to other components of the PEgRNA, or to particular nucleotides (e.g., mutations) in the FANCC target gene can vary. In some embodiments, the nucleotide edit is in a region of the PEgRNA corresponding to or homologous to the protospacer sequence. In some embodiments, the nucleotide edit is in a region of the PEgRNA corresponding to a region of the FANCC gene outside of the protospacer sequence.

[0227] In some embodiments, the position of a nucleotide edit incorporation in the target gene may be upstream or downstream with respect to another sequence. By “upstream” and “downstream” it is intended to define relevant positions at least two regions or sequences in a nucleic acid molecule orientated in a 5′-to-3′ direction. For example, a first sequence is upstream of a second sequence in a DNA molecule where the first sequence is positioned 5′ to the second sequence. Accordingly, the second sequence is downstream of the first sequence.

[0228] In some embodiments, the position of a nucleotide edit incorporation in the target gene can be referred to based on position of the nick site. In some embodiments, position of an intended nucleotide edit is 0, 1, 2, 3, 4, 5, 6, 7, 8, 9, 10, 11, 12, 13, 14, 15, 16, 17, 18, 19, 20, 21, 22, 23, 24, 25, 26, 27, 28, 29, 30, 31, 32, 33, 34, 35, 36, 37, 38, 39, 40, 45, 50, 55, 60, 65, 70, 75, 80, 85, 90, 95, 100, 110, 120, 130, 140, or 150 nucleotides apart from the nick site. In some embodiments, position of an intended nucleotide edit is 0, 1, 2, 3, 4, 5, 6, 7, 8, 9, 10, 11, 12, 13, 14, 15, 16, 17, 18, 19, 20, 21, 22, 23, 24, 25, 26, 27, 28, 29, 30, 31, 32, 33, 34, 35, 36, 37, 38, 39, 40, 45, 50, 55, 60, 65, 70, 75, 80, 85, 90, 95, 100, 110, 120, 130, 140, or 150 nucleotides downstream of the nick site on the PAM strand (or the non-target strand, or the edit strand) of the double stranded target DNA. In some embodiments, position of the intended nucleotide edit in the editing template can be referred to by aligning the editing template with the partially complementary editing target sequence on the edit strand, and referring to nucleotide positions on the editing strand where the intended nucleotide edit is incorporated. Accordingly, in some embodiments, a nucleotide edit in an editing template is at a position corresponding to a position about 0, 1, 2, 3, 4, 5, 6, 7, 8, 9, 10, 11, 12, 13, 14, 15, 16, 17, 18, 19, 20, 21, 22, 23, 24, 25, 26, 27, 28, 29, 30, 31, 32, 33, 34, 35, 36, 37, 38, 39, 40, 45, 50, 55, 60, 65, 70, 75, 80, 85, 90, 95, 100, 110, 120, 130, 140, or 150 nucleotides apart from the nick site. In some embodiments, a nucleotide edit in an editing template is at a position corresponding to a position about 0 to 2 nucleotides, 0 to 4 nucleotides, 0 to 6 nucleotides, 0 to 8 nucleotides, 0 to 10 nucleotides, 2 to 4 nucleotides, 2 to 6 nucleotides, 2 to 8 nucleotides, 2 to 10 nucleotides, 2 to 12 nucleotides, 4 to 6 nucleotides, 4 to 8 nucleotides, 4 to 10 nucleotides, 4 to 12 nucleotides, 4 to 14 nucleotides, 6 to 8 nucleotides, 6 to 10 nucleotides, 6 to 12 nucleotides, 6 to 14 nucleotides, 6 to 16 nucleotides, 8 to 10 nucleotides, 8 to 12 nucleotides, 8 to 14 nucleotides, 8 to 16 nucleotides, 8 to 18 nucleotides, 10 to 12 nucleotides, 10 to 14 nucleotides, 10 to 16 nucleotides, 10 to 18 nucleotides, 10 to 20 nucleotides, 12 to 14 nucleotides, 12 to 16 nucleotides, 12 to 18 nucleotides, 12 to 20 nucleotides, 12 to 22 nucleotides, 14 to 16 nucleotides, 14 to 18 nucleotides, 14 to 20 nucleotides, 14 to 22 nucleotides, 14 to 24 nucleotides, 16 to 18 nucleotides, 16 to 20 nucleotides, 16 to 22 nucleotides, 16 to 24 nucleotides, 16 to 26 nucleotides, 18 to 20 nucleotides, 18 to 22 nucleotides, 18 to 24 nucleotides, 18 to 26 nucleotides, 18 to 28 nucleotides, 20 to 22 nucleotides, 20 to 24 nucleotides, 20 to 26 nucleotides, 20 to 28 nucleotides, 20 to 30 nucleotides, 30 to 40 nucleotides, 40 to 50 nucleotides, 50 to 60 nucleotides, 60 to 70 nucleotides, 70 to 80 nucleotides, 80 to 90 nucleotides, 90 to 100 nucleotides, 100 to 110 nucleotides, 110 to 120 nucleotides, 120 to 130 nucleotides, 130 to 140 nucleotides, or 140 to 150 nucleotides apart from the nick site. In some embodiments, when referred to in the context of the PAM strand (or the non-target strand, or the edit strand), a nucleotide edit in an editing template is at a position corresponding to a position about 0 to 2 nucleotides, 0 to 4 nucleotides, 0 to 6 nucleotides, 0 to 8 nucleotides, 0 to 10 nucleotides, 2 to 4 nucleotides, 2 to 6 nucleotides, 2 to 8 nucleotides, 2 to 10 nucleotides, 2 to 12 nucleotides, 4 to 6 nucleotides, 4 to 8 nucleotides, 4 to 10 nucleotides, 4 to 12 nucleotides, 4 to 14 nucleotides, 6 to 8 nucleotides, 6 to 10 nucleotides, 6 to 12 nucleotides, 6 to 14 nucleotides, 6 to 16 nucleotides, 8 to 10 nucleotides, 8 to 12 nucleotides, 8 to 14 nucleotides, 8 to 16 nucleotides, 8 to 18 nucleotides, 10 to 12 nucleotides, 10 to 14 nucleotides, 10 to 16 nucleotides, 10 to 18 nucleotides, 10 to 20 nucleotides, 12 to 14 nucleotides, 12 to 16 nucleotides, 12 to 18 nucleotides, 12 to 20 nucleotides, 12 to 22 nucleotides, 14 to 16 nucleotides, 14 to 18 nucleotides, 14 to 20 nucleotides, 14 to 22 nucleotides, 14 to 24 nucleotides, 16 to 18 nucleotides, 16 to 20 nucleotides, 16 to 22 nucleotides, 16 to 24 nucleotides, 16 to 26 nucleotides, 18 to 20 nucleotides, 18 to 22 nucleotides, 18 to 24 nucleotides, 18 to 26 nucleotides, 18 to 28 nucleotides, 20 to 22 nucleotides, 20 to 24 nucleotides, 20 to 26 nucleotides, 20 to 28 nucleotides, 20 to 30 nucleotides, 30 to 40 nucleotides, 40 to 50 nucleotides, 50 to 60 nucleotides, 60 to 70 nucleotides, 70 to 80 nucleotides, 80 to 90 nucleotides, 90 to 100 nucleotides, 100 to 110 nucleotides, 110 to 120 nucleotides, 120 to 130 nucleotides, 130 to 140 nucleotides, or 140 to 150 nucleotides downstream from the nick site. The relative positions of the intended nucleotide edit(s) and nick site may be referred to by numbers. For example, in some embodiments, the nucleotide immediately downstream of the nick site on a PAM strand (or the non-target strand, or the edit strand) may be referred to as at position 0. The nucleotide immediately upstream of the nick site on the PAM strand (or the non-target strand, or the edit strand) may be referred to as at position −1. The nucleotides downstream of position 0 on the PAM strand can be referred to as at positions +1, +2, +3, +4, . . . +n, and the nucleotides upstream of position −1 on the PAM strand may be referred to as at positions −2, −3, −4, . . . , −n. Accordingly, in some embodiments, the nucleotide in the editing template that corresponds to position 0 when the editing template is aligned with the partially complementary editing target sequence by complementarity can also be referred to as position 0 in the editing template, the nucleotides in the editing template corresponding to the nucleotides at positions +1, +2, +3, +4, . . . , +n on the PAM strand of the double stranded target DNA can also be referred to as at positions +1, +2, +3, +4, . . . , +n in the editing template, and the nucleotides in the editing template corresponding to the nucleotides at positions −1, −2, −3, −4, . . . , −n on the PAM strand on the double stranded target DNA may also be referred to as at positions −1, −2, −3, −4, . . . , −n on the editing template, even though when the PEgRNA is viewed as a standalone nucleic acid, positions +1, +2, +3, +4, . . . , +n are 5′ of position 0 and positions −1, −2, −3, −4, . . . −n are 3′ of position 0 in the editing template. In some embodiments, an intended nucleotide edit is at position +n of the editing template relative to position 0. Accordingly, the intended nucleotide edit may be incorporated at position +n of the PAM strand of the double stranded target DNA (and subsequently, the target strand of the double stranded target DNA) by prime editing.

[0229] The corresponding positions of the intended nucleotide edit incorporated in the FANCC gene may also be referred to based on the nicking position generated by a prime editor based on sequence homology and complementarity. For example, in embodiments, the distance between the nucleotide edit to be incorporated into the FANCC gene and the nick site (also referred to as the “nick to edit distance”) may be determined by the position of the nick site and the position of the nucleotide(s) corresponding to the intended nucleotide edit(s), for example, by identifying sequence complementarity between the spacer and the search target sequence and sequence complementarity between the editing template and the editing target sequence. In certain embodiments, the position of the nucleotide edit can be in any position downstream of the nick site on the edit strand (or the PAM strand). As used herein, the distance between the nick site and the nucleotide edit, for example, where the nucleotide edit comprises an insertion or deletion, refers to the 3′ position of the nucleotide edit for a nick that creates a 3′ free end on the edit strand. For example, the nick-to-edit distance for a one-nucleotide insertion immediately downstream of the nick site is 1. In some embodiments, the nick-to-edit distance is from 1 to 150. In some embodiments, the nick-to-edit distance is from 1 to 10, from 10 to 20, from 20 to 30, from 30 to 40, from 40 to 50, from 50 to 60, from 60 to 70, from 70 to 80, from 80 to 90, from 90 to 100, from 100 to 110, from 110 to 120, from 120 to 130, from 130 to 140, or from 140 to 150. In some embodiments, the nick-to-edit distance is 1, 2, or 3. For a PEgRNA that can complex with a prime editor having a Cas9 nickase, e.g., a SpCas9 nickase, a nick-to-edit distance of 3 or less indicates that incorporation of the edit encoded by the RTT of the PEgRNA can alter the protospacer sequence that corresponds to the spacer sequence of the PEgRNA. Such edits may be referred to as protospacer edits. Without wishing to be bound by theory, protospacer edits may prevent the Cas9 nickase from re-nicking the edit strand, thereby improving prime editing efficiency or reduce indel formation.

[0230] The RTT length and the nick-to-edit distance relate to the length of the portion of the RTT that is upstream of (i.e. 5′ to) the 5′-most edit in the RTT and is complementary to the edit strand. In some embodiments, the editing template comprises at least 4 contiguous nucleotides of complementarity with the edit strand wherein the at least 4 nucleotides contiguous are located upstream of the 5′ most edit in the editing template. In some embodiments, the editing template comprises at least 5, 6, 7, 8, 9, 10, 11, 12, 13, 14, 15, 16, 17, 18, 19, or more contiguous nucleotides of complementarity with the edit strand wherein the at least 5, 6, 7, 8, 9, 10, 11, 12, 13, 14, 15, 16, 17, 18, 19, or more contiguous nucleotides are located upstream of the 5′ most edit in the editing template. In some embodiments, the editing template comprises 20-25, 25-30, 30-35, 35-40, 45-45, or 45-50 contiguous nucleotides of complementarity with the edit strand wherein the 20-25, 25-30, 30-35, 35-40, 45-45, or 45-50 or more contiguous nucleotides are located upstream of the 5′ most edit in the editing template. In some embodiments, the editing template comprises 9-14 contiguous nucleotides of complementarity with the edit strand wherein the 9-14 contiguous nucleotides are located upstream of the 5′ most edit in the editing template. In some embodiments, the editing template comprises 6-10 contiguous nucleotides of complementarity with the edit strand wherein the 6-10 contiguous nucleotides are located upstream of the 5′ most edit in the editing template. In some embodiments, the editing template comprises 10 contiguous nucleotides of complementarity with the edit strand wherein the 10 contiguous nucleotides are located upstream of the 5′ most edit in the editing template. In some embodiments, the editing template comprises 9 contiguous nucleotides of complementarity with the edit strand wherein the 9 contiguous nucleotides are located upstream of the 5′ most edit in the editing template.

[0231] When referred to within the PEgRNA, positions of the one or more intended nucleotide edits may be referred to relevant to components of the PEgRNA. For example, an intended nucleotide edit may be 5′ or 3′ to the PBS. In some embodiments, a PEgRNA comprises the structure, from 5′ to 3′: a spacer, a gRNA core, an editing template, and a PBS. In some embodiments, the intended nucleotide edit is 0, 1, 2, 3, 4, 5, 6, 7, 8, 9, 10, 11, 12, 13, 14, 15, 16, 17, 18, 19, 20, 21, 22, 23, 24, 25, 26, 27, 28, 29, 30, 31, 32, 33, 34, 35, 36, 37, 38, 39, or 40 nucleotides upstream to the 5′ most nucleotide of the PBS. In some embodiments, the intended nucleotide edit is 0 to 2 nucleotides, 0 to 4 nucleotides, 0 to 6 nucleotides, 0 to 8 nucleotides, 0 to 10 nucleotides, 2 to 4 nucleotides, 2 to 6 nucleotides, 2 to 8 nucleotides, 2 to 10 nucleotides, 2 to 12 nucleotides, 4 to 6 nucleotides, 4 to 8 nucleotides, 4 to 10 nucleotides, 4 to 12 nucleotides, 4 to 14 nucleotides, 6 to 8 nucleotides, 6 to 10 nucleotides, 6 to 12 nucleotides, 6 to 14 nucleotides, 6 to 16 nucleotides, 8 to 10 nucleotides, 8 to 12 nucleotides, 8 to 14 nucleotides, 8 to 16 nucleotides, 8 to 18 nucleotides, 10 to 12 nucleotides, 10 to 14 nucleotides, 10 to 16 nucleotides, 10 to 18 nucleotides, 10 to 20 nucleotides, 12 to 14 nucleotides, 12 to 16 nucleotides, 12 to 18 nucleotides, 12 to 20 nucleotides, 12 to 22 nucleotides, 14 to 16 nucleotides, 14 to 18 nucleotides, 14 to 20 nucleotides, 14 to 22 nucleotides, 14 to 24 nucleotides, 16 to 18 nucleotides, 16 to 20 nucleotides, 16 to 22 nucleotides, 16 to 24 nucleotides, 16 to 26 nucleotides, 18 to 20 nucleotides, 18 to 22 nucleotides, 18 to 24 nucleotides, 18 to 26 nucleotides, 18 to 28 nucleotides, 20 to 22 nucleotides, 20 to 24 nucleotides, 20 to 26 nucleotides, 20 to 28 nucleotides, or 20 to 30 nucleotides upstream to the 5′ most nucleotide of the PBS.

[0232] In some embodiments, the editing template can comprise a second edit relative to a target sequence. The second edit can be designed to mutate or edit a PAM sequence such that a corresponding nucleic acid guided nuclease or CRISPR nuclease is no longer able to cleave the target sequence (such edits referred to as “PAM silencing edits).

[0233] Without wishing to be bound by any particular theory, PAM silencing edits may prevent the Cas, e.g., Cas9, nickase, from re-nicking the edit strand before the edit is incorporated in the target strand, therefore improving prime editing efficiency. In some embodiments, a PAM silencing edit is a synonymous edit that does not alter the amino acid sequence encoded by the FANCC gene after incorporation of the edit. In some embodiments, a PAM silencing edit is at a position corresponding to a coding region, e.g., an exon, of a FANCC gene. In some embodiments, a PAM silencing edit is at a position corresponding to a non-coding region, e.g., an intron, of a FANCC gene. In some embodiments, the edits in an intron of a FANCC gene is not at a position that corresponds to intron-exon junction and the edit does not affect transcript splicing.

[0234] In some embodiments, the length of the editing template is at least 2, 3, 4, 5, 6, 7, 8, 9, 10, 11, 12, 13, 14, 15, 16, 17, 18, 19, 20, 21, 22, 23, 24, 25, 26, 27, 28, 29, 30, 31, 32, 33, 34, 35, 36, 37, 38, 39, 40, 41, 42, 43, 44, 45, 46, 47, 48, 49, 50, 51, 52, 53, 54, 55, 56, 57, 58, 59, 60, 61, 62, 63, 64, 65, 66, 67, 68, 69, 70, 71, 72, 73, 74, 75, 76, 77, 78, 79, or 80 nucleotides longer than the nick to edit distance. In some embodiments, the length of the editing template is at least 4 nucleotides longer than the nick to edit distance. In some embodiments, for example, the nick to edit distance is 8 nucleotides, and the editing template is 10 to 15, 10 to 20, 10 to 25, 10 to 30, 10 to 35, 10 to 40, 10 to 45, 10 to 50, 10 to 55, 10 to 60, 10 to 65, 10 to 70, 10 to 75, or 10 to 80 nucleotides in length. In some embodiments, the nick to edit distance is 22 nucleotides, and the editing template is 24 to 28, 24 to 30, 24 to 32, 24 to 34, 24 to 36, 24 to 37, 24 to 38, 24 to 40, 24 to 45, 24 to 50, 24 to 55, 24 to 60, 24 to 65, 24 to 70, 24 to 75, 24 to 80, 24 to 85, 24 to 90, 24 to 95, 24 to 100, 24 to 105, 24 to 100, 24 to 105, or 24 to 110 nucleotides in length.

[0235] In some embodiments, the editing template comprises an adenine at the first nucleobase position (e.g., for a PEgRNA following 5′-spacer-gRNA core-RTT-PBS-3′ orientation, the 5′ most nucleobase is the “first base”). In some embodiments, the editing template comprises a guanine at the first nucleobase position (e.g., for a PEgRNA following 5′-spacer-gRNA core-RTT-PBS-3′ orientation, the 5′ most nucleobase is the “first base”). In some embodiments, the editing template comprises an uracil at the first nucleobase position (e.g., for a PEgRNA following 5′-spacer-gRNA core-RTT-PBS-3′ orientation, the 5′ most nucleobase is the “first base”). In some embodiments, the editing template comprises a cytosine at the first nucleobase position (e.g., for a PEgRNA following 5′-spacer-gRNA core-RTT-PBS-3′ orientation, the 5′ most nucleobase is the “first base”). In some embodiments, the editing template does not comprise a cytosine at the first nucleobase position (e.g., for a PEgRNA following 5′-spacer-gRNA core-RTT-PBS-3′ orientation, the 5′ most nucleobase is the “first base”).

[0236] The editing template of a PEgRNA may encode a new single stranded DNA (e.g. by reverse transcription) to replace an editing target sequence in the target gene. In some embodiments, the editing target sequence in the edit strand of the target gene is replaced by the newly synthesized strand, and the nucleotide edit(s) are incorporated in the region of the target gene. In some embodiments, the target gene is an FANCC gene. In some embodiments, the editing template of the PEgRNA encodes a newly synthesized single stranded DNA that comprises a wild type FANCC gene sequence. In some embodiments, the newly synthesized DNA strand replaces the editing target sequence in the target FANCC gene, wherein the editing target sequence (or the endogenous sequence complementary to the editing target sequence on the target strand of the FANCC gene) comprises a mutation or a nucleotide alteration compared to a wild type FANCC gene. In some embodiments, the mutation is associated with Fanconi anemia; FA-C.

[0237] In some embodiments, the editing target sequence comprises a mutation in an intron of the FANCC gene as compared to a wild type FANCC gene. In some embodiments, the editing target sequence comprises a mutation in an intron of the FANCC gene that results in altered or aberrant splicing of a transcript encoded by the FANCC gene compared to a transcript encoded by a wild type FANCC gene.

[0238] In some embodiments, the editing target sequence comprises a mutation that is located between positions 95,171,933 and 95,172,133 of human chromosome 9. In some embodiments, the editing target sequence comprises a mutation in intron 4 of the FANCC gene compared to a wild type FANCC gene. In some embodiments, the editing target sequence comprises a mutation that encodes a nucleotide substitution compared to a wild type FANCC gene as set forth in SEQ ID NO: 3809. In some embodiments, the editing target sequence comprises a nucleotide transversion relative to a wild type FANCC gene set forth as SEQ ID NO: 3809. In some embodiments, the editing target sequence comprises an A to T transversion at position 95,172,033 in human chromosome 9 (a c.456+4A->T (IVS4+4A>T) mutation) as compared to a wild type FANCC gene.

[0239] In some embodiments, the editing target sequence comprises a mutation in an exon of the FANCC gene as compared to a wild type FANCC gene. In some embodiments, the editing target sequence comprises a mutation in exon 1 of the FANCC gene as compared to a wild type FANCC gene.

[0240] In some embodiments, the editing target sequence comprises a mutation that is located between positions 95,249,125 and 95,249,325 of human chromosome 9. In some embodiments, the editing target sequence comprises a mutation that results in a frameshift in a transcript encoded by the FANCC gene as compared to a transcript encoded by a wild type FANCC gene. In some embodiments, the editing target sequence comprises a mutation that is a deletion compared to a wild type FANCC gene set forth as SEQ ID NO: 3809. In some embodiments, the editing target sequence comprises a deletion of a nucleotide guanine at position 95,249,225 in human chromosome 9 (a c.67del (322delG) mutation) as compared to a wild type FANCC gene.

[0241] In some embodiments, the editing template comprises one or more intended nucleotide edits compared to the sequence on the target strand of the FANCC gene that is complementary to the editing target sequence. In some embodiments, the editing template encodes a single stranded DNA that comprises one or more intended nucleotide edits compared to the editing target sequence. In some embodiments, the single stranded DNA replaces the editing target sequence by prime editing, thereby incorporating the one or more intended nucleotide edits.

[0242] In some embodiments, incorporation of the one or more intended nucleotide edits corrects the mutation in the editing target sequence to wild type nucleotides at corresponding positions in the FANCC gene. As used herein, “correcting” a mutation means restoring a wild type sequence at the place of the mutation in the double stranded target DNA, e.g. target gene, by prime editing. In some embodiments, the editing template comprises and/or encodes a wild type FANCC gene sequence.

[0243] In some embodiments, incorporation of the one or more intended nucleotide edits does not correct the mutation in the editing target sequence to wild type sequence, but allows for expression of a functional FANCC protein encoded by the FANCC gene.

[0244] In some embodiments, the editing template comprises one or more intended nucleotide edits compared to the sequence on the target strand of the FANCC gene that is complementary to the editing target sequence, wherein the one or more intended nucleotide edits is a single nucleotide substitution. In some embodiments, the intended nucleotide edit in the editing template comprises an A to T nucleotide substitution compared to the sequence on the target strand of the FANCC gene that is complementary to the editing target sequence (that is, the single stranded DNA encoded by the editing template comprises a T to A nucleotide substitution compared to the editing target sequence) at a position corresponding to position 95,172,033 of human chromosome 9, wherein the editing target sequence is on the sense strand of the FANCC gene. In some embodiments, the intended nucleotide edit in the editing template comprises a T to A nucleotide substitution compared to the sequence on the target strand of the FANCC gene that is complementary to the editing target sequence (that is, the single stranded DNA encoded by the editing template comprises an A to T nucleotide substitution compared to the editing target sequence) at a position corresponding to position 95,172,033 of human chromosome 9, wherein the editing target sequence is on the antisense strand of the FANCC gene.

[0245] In some embodiments, the editing template comprises one or more intended nucleotide edits compared to the sequence on the target strand of the FANCC gene that is complementary to the editing target sequence, wherein the one or more intended nucleotide edits is a single nucleotide insertion. In some embodiments, the intended nucleotide edit in the editing template comprises an insertion of nucleotide Cytidine compared to the sequence on the target strand of the FANCC gene that is complementary to the editing target sequence (that is, the single stranded DNA encoded by the editing template comprises an insertion of nucleotide Guanine compared to the editing target sequence) at a position corresponding to position 95,249,225 of human chromosome 9, wherein the editing target sequence is on the sense strand of the FANCC gene. In some embodiments, the intended nucleotide edit in the editing template comprises an insertion of nucleotide Guanine compared to the sequence on the target strand of the FANCC gene that is complementary to the editing target sequence (that is, the single stranded DNA encoded by the editing template comprises an insertion of nucleotide Cytidine compared to the editing target sequence) at a position corresponding to position 95,249,225 of human chromosome 9, wherein the editing target sequence is on the antisense strand of the FANCC gene.

[0246] A guide RNA core (also referred to herein as the gRNA core, gRNA scaffold, or gRNA backbone sequence) of a PEgRNA may contain a polynucleotide sequence that binds to a DNA binding domain (e.g., Cas9) of a prime editor. The gRNA core may interact with a prime editor as described herein, for example, by association with a DNA binding domain, such as a DNA nickase of the prime editor.

[0247] One of skill in the art will recognize that different prime editors having different DNA binding domains from different DNA binding proteins may require different gRNA core sequences specific to the DNA binding protein. In some embodiments, the gRNA core is capable of binding to a Cas9-based prime editor. In some embodiments, the gRNA core is capable of binding to a Cpf1-based prime editor. In some embodiments, the gRNA core is capable of binding to a Cas12b-based prime editor.

[0248] In some embodiments, the gRNA core comprises regions and secondary structures involved in binding with specific CRISPR Cas proteins. For example, in a Cas9 based prime editing system, the gRNA core of a PEgRNA may comprise one or more regions of a base paired “lower stem” adjacent to the spacer sequence and a base paired “upper stem” following the lower stem, where the lower stem and upper stem may be connected by a “bulge” comprising unpaired RNAs. The gRNA core may further comprise a “nexus” distal from the spacer sequence, followed by a hairpin structure, e.g., at the 3′ end, as exemplified in FIG. 3. In some embodiments, the gRNA core comprises modified nucleotides as compared to a wild type gRNA core in the lower stem, upper stem, and/or the hairpin. For example, nucleotides in the lower stem, upper stem, an/or the hairpin regions may be modified, deleted, or replaced. In some embodiments, RNA nucleotides in the lower stem, upper stem, an/or the hairpin regions may be replaced with one or more DNA sequences. In some embodiments, the gRNA core comprises unmodified or wild type RNA sequences in the nexus and/or the bulge regions. In some embodiments, the gRNA core does not include long stretches of A-U pairs, for example, a GUUUU-AAAAC pairing element. In some embodiments, a prime editing system comprises a prime editor and a PEgRNA, wherein the prime editor comprises a SpCas9 nickase variant thereof, and the gRNA core comprises the sequence provided in SEQ ID NOs: 3666, 3667, or 3668.

[0249] The gRNA core sequences below are annotated with SEQ ID NO as required by ST.26 standard. Although all the sequences provided in Table 62 are RNA sequences, “T” is used instead of a “U” in the sequences for consistency with the ST.26 standard.

(SEQ ID NO: 3666)
GTTTTAGAGCTAGAAATAGCAAGTTAAAATAAGGCTAGTCCGTTATCAA
CTTGAAAAAGTGGCACCGAGTCGGTGC;
(SEQ ID NO: 3667)
GTTTGAGAGCTAGAAATAGCAAGTTTAAATAAGGCTAGTCCGTTATCAA
CTTGAAAAAGTGGGACCGAGTCGGTCC,
or
(SEQ ID NO: 3668)
GTTTAAGAGCTATGCTGGAAACAGCATAGCAAGTTTAAATAAGGCTAGT
CCGTTATCAACTTGAAAAAGTGGCACCGAGTCGGTGC.

In some embodiments, the gRNA core comprises the sequence

(SEQ ID NO: 3666)
GTTTTAGAGCTAGAAATAGCAAGTTAAAATAAGGCTAGTCCGTTATCAA
CTTGAAAAAGTGGCACCGAGTCGGTGC.

[0250] Any gRNA core sequences known in the art are also contemplated in the prime editing compositions described herein.

[0251] The gRNA core of a PEgRNA or ngRNA can be any gRNA scaffold sequence that is capable of interacting with a Cas protein that recognizes the corresponding PAM of the PEgRNA or ngRNA. In some embodiments, gRNA core of a PEgRNA or a ngRNA comprises a nucleic acid sequence selected from SEQ ID Nos: 3666-3670 or 3796-3800.

[0252] A PEgRNA can also comprise optional modifiers, e.g., 3′ end modifier region and/or an 5′ end modifier region. In some embodiments, a PEgRNA comprises at least one nucleotide that is not part of a spacer, a gRNA core, or an extension arm. The optional sequence modifiers can be positioned within or between any of the other regions shown, and not limited to being located at the 3′ and 5′ ends. In certain embodiments, the PEgRNA comprises secondary RNA structure, such as, but not limited to, aptamers, hairpins, stem/loops, toeloops, and/or RNA-binding protein recruitment domains (e.g., the MS2 aptamer which recruits and binds to the MS2cp protein). In some embodiments, a PEgRNA comprises a short stretch of uracil at the 5′ end or the 3′ end. For example, in some embodiments, a PEgRNA comprising a 3′ extension arm comprises a “UUU” sequence at the 3′ end of the extension arm. In some embodiments, a PEgRNA comprises a toeloop sequence at the 3′ end. In some embodiments, the PEgRNA comprises a 3′ extension arm and a toeloop sequence at the 3′ end of the extension arm. In some embodiments, the PEgRNA comprises a 5′ extension arm and a toeloop sequence at the 5′ end of the extension arm. In some embodiments, the PEgRNA comprises a toeloop element having the sequence 5′-GAAANNNNN-3′, wherein N is any nucleobase. In some embodiments, the secondary RNA structure is positioned within the spacer. In some embodiments, the secondary structure is positioned within the extension arm. In some embodiments, the secondary structure is positioned within the gRNA core. In some embodiments, the secondary structure is positioned between the spacer and the gRNA core, between the gRNA core and the extension arm, or between the spacer and the extension arm. In some embodiments, the secondary structure is positioned between the PBS and the editing template. In some embodiments the secondary structure is positioned at the 3′ end or at the 5′ end of the PEgRNA. In some embodiments, the PEgRNA comprises a transcriptional termination signal at the 3′ end of the PEgRNA. In addition to secondary RNA structures, the PEgRNA may comprise a chemical linker or a poly(N) linker or tail, where “N” can be any nucleobase. In some embodiments, the chemical linker may function to prevent reverse transcription of the gRNA core.

[0253] In some embodiments, a prime editing system or composition further comprises a nick guide polynucleotide, such as a nick guide RNA (ngRNA). In some embodiments, a ngRNA comprises a spacer (referred to as a ngRNA spacer or ng spacer) and a gRNA core, wherein the spacer of the ngRNA comprises a region of complementarity to the edit strand, and wherein the gRNA core can interact with a Cas, e.g., Cas9, of a prime editor. Without wishing to be bound by any particular theory, an ngRNA may bind to the edit strand and direct the Cas nickase to generate a nick on the non-edit strand (or target strand). In some embodiments, the nick on the non-edit strand directs endogenous DNA repair machinery to use the edit strand as a template for repair of the non-edit strand, which may increase efficiency of prime editing. In some embodiments, the non-edit strand is nicked by a prime editor localized to the non-edit strand by the ngRNA. Accordingly, also provided herein are PEgRNA systems comprising at least one PEgRNA and at least one ngRNA.

[0254] A prime editing system comprising a PEgRNA (or one or more polynucleotide encoding the PEgRNA) and a prime editor protein (or one or more polynucleotides encoding the prime editor), may be referred to as a PE2 prime editing system and the corresponding editing approach referred to as PE2 approach or PE2 strategy. A PE2 system does not contain a ngRNA. A prime editing system comprising a PEgRNA (or one or more polynucleotide encoding the PEgRNA), a prime editor protein (or one or more polynucleotides encoding the prime editor), and a ngRNA (or one or more polynucleotides encoding the ngRNA) may be referred to as a “PE3” prime editing system. In some embodiments, an ngRNA spacer sequence is complementary to a portion of the edit strand that includes the intended nucleotide edit, and may hybridize with the edit strand only after the edit has been incorporated on the edit strand. Such ngRNA may be referred to a “PE3b” ngRNA, and the prime editing system a PE3b prime editing system.

[0255] In some embodiments, a PEgRNA or a nick guide RNA (ngRNA) can be chemically synthesized, or can be assembled or cloned and transcribed from a DNA sequence, e.g., a plasmid DNA sequence, or by any RNA oligonucleotide synthesis method known in the art. In some embodiments, DNA sequence that encodes a PEgRNA (or ngRNA) can be designed to append one or more nucleotides at the 5′ end or the 3′ end of the PEgRNA (or nick guide RNA) encoding sequence to enhance PEgRNA transcription. For example, in some embodiments, a DNA sequence that encodes a PEgRNA (or nick guide RNA) (or an ngRNA) can be designed to append a nucleotide G at the 5′ end. Accordingly, in some embodiments, the PEgRNA (or nick guide RNA) can comprise an appended nucleotide G at the 5′ end. In some embodiments, a DNA sequence that encodes a PEgRNA (or nick guide RNA) can be designed to append a sequence that enhances transcription, e.g., a Kozak sequence, at the 5′ end. In some embodiments, a DNA sequence that encodes a PEgRNA (or nick guide RNA) can be designed to append the sequence CACC or CCACC at the 5′ end. Accordingly, in some embodiments, the PEgRNA (or nick guide RNA) can comprise an appended sequence CACC or CCACC at the 5′ end. In some embodiments, a DNA sequence that encodes a PEgRNA (or nick guide RNA) can be designed to append the sequence TTT, TTTT. TTTTT, TTTTTT, or TTTTTTT at the 3′ end. Accordingly, in some embodiments, the PEgRNA (or nick guide RNA) can comprise an appended sequence UUU, UUUU, UUUUU, UUUUUU, or UUUUUUU at the 3′ end.

[0256] In some embodiments, a PEgRNA or a ngRNA comprises terminal or end adaptation sequences. In some embodiments, a PEgRNA or a ngRNA comprises the sequence UUUU (sequence number 3807) at the 3′ end. In some embodiments, a PEgRNA or a ngRNA comprises the sequence UUUUUUU (sequence number 3808) at the 3′ end. In some embodiments, a PEgRNA or a ngRNA comprises a 3′ terminator sequence (e.g., UUUU) at the 3′ end. In some embodiments, a PEgRNA or a ngRNA comprises a transcription adaptation sequence (e.g., UUUUUUU) at the 3′ end.

[0257] As shown in Tables 1-52 herein, in some embodiments, a PEgRNA or a ngRNA comprises the sequence TTTT (sequence number 3807) at the 3′ end. In some embodiments, a PEgRNA or a ngRNA comprises the sequence TTTTTTT (sequence number 3808) at the 3′ end. In some embodiments, a PEgRNA or a ngRNA comprises a 3′ terminator sequence (e.g., TTTT; sequence number 3807) at the 3′ end. In some embodiments, a PEgRNA or a ngRNA comprises a transcription adaptation sequence (e.g., TTTTTTT sequence number 3808) at the 3′ end. The sequences in sequence number 3807 and sequence number 3808 are annotated with a sequence number as required by ST.26 standard. Although the sequences set forth in sequence number 3807 and sequence number 3808 are RNA sequences, “T” is used instead of a “U” in the sequences for consistency with the ST.26 standard.

[0258] In some embodiments, a PEgRNA or ngRNA may include a modifying sequence at the 3′ end having the sequence AACAUUGACGCGUCUCUACGUGGGGGCGCG (SEQ ID NO: 3761).

[0259] In some embodiments, a PEgRNA or ngRNA may include a modifying sequence at the 3′ end having the sequence AACAUUGA (sequence number 3811).

[0260] In some embodiments, a PEgRNA or ngRNA can include a linker sequence comprising the sequence AACAUUGA (sequence number 3811). In Tables 1-52, this linker sequence is set forth as AACATTGA with “T” instead of “U”, for consistency with the ST.26 standard.

[0261] In some embodiments, a PEgRNA or ngRNA can include a hairpin sequence comprising CGCGTCTCTACGTGGGGGCGCG (SEQ ID NO: 3591). In some embodiments, a PEgRNA or ngRNA comprises a 3′ hairpin sequence comprising SEQ ID NO: 3591. In SEQ ID NO: 3591, “T” is used instead of “U”, for consistency with the ST.26 standard.

[0262] In some embodiments, the ng search target sequence is located on the non-target strand, within 10 base pairs to 100 base pairs of an intended nucleotide edit incorporated by the PEgRNA on the edit strand. In some embodiments, the ng target search target sequence is within 10 bp, 20 bp, 30 bp, 40 bp, 50 bp, 60 bp, 70 bp, 80 bp, 90 bp, 91 bp, 92 bp, 93 bp, 94 bp, 95 bp, 96 bp, 97 bp, 98 bp, 99 bp, or 100 bp of an intended nucleotide edit incorporated by the PEgRNA on the edit strand. In some embodiments, the 5′ ends of the ng search target sequence and the PEgRNA search target sequence are within 1, 2, 3, 4, 5, 6, 7, 8, 9, or 10 bp apart from each other. In some embodiments, the 5′ ends of the ng search target sequence and the PEgRNA search target sequence are within 10 bp, 20 bp, 30 bp, 40 bp, 50 bp, 60 bp, 70 bp, 80 bp, 90 bp, 91 bp, 92 bp, 93 bp, 94 bp, 95 bp, 96 bp, 97 bp, 98 bp, 99 bp, or 100 bp apart from each other.

[0263] In some embodiments, an ng spacer sequence is complementary to, and may hybridize with the second search target sequence only after an intended nucleotide edit has been incorporated on the edit strand, by the editing template of a PEgRNA. In some embodiments, such a prime editing system maybe referred to as a “PE3b” prime editing system or composition. In some embodiments, the ngRNA comprises a spacer sequence that matches only the edit strand after incorporation of the nucleotide edits, but not the endogenous target gene sequence on the edit strand. Accordingly, in some embodiments, an intended nucleotide edit is incorporated within the ng search target sequence. In some embodiments, the intended nucleotide edit is incorporated within about 1-10 nucleotides of the position corresponding to the PAM of the ng search target sequence.

[0264] A ngRNA protospacer may be in close proximity to the PEgRNA spacer, or may be upstream or downstream of the PEgRNA spacer. In some embodiments, the distance generated by the PEgRNA nick site and the ngRNA nick site (referred to as the nick-to-nick distance) is about 3 to about 100 nucleotides. In some embodiments, the distance generated by the PEgRNA nick site and the ngRNA nick site (referred to as the nick-to-nick distance) is about 4-90, 4-80, 4-70, 4-60, 4-50, 4-40, 4-30, 4-20, or 4-10 nucleotides.

[0265] In some embodiments, the distance generated by the PEgRNA nick site and the ngRNA nick site (referred to as the nick-to-nick distance) is about 10-20, 20-30, 30-40, 40-50, 50-60, 60-70, 70-80, 80-90, or 90-100 nucleotides. In some embodiments, the nick-to-nick distance is about 4-88 nucleotides. In some embodiments, the nick-to-nick distance is about 4-72 nucleotides. In some embodiments, the nick-to-nick distance is about 4-61 nucleotides. In some embodiments, the nick-to-nick distance is about 61-72 nucleotides. In some embodiments, the nick-to-nick distance is about 61-88 nucleotides. In some embodiments, the nick-to-nick distance is about 72-88 nucleotides. In some embodiments, the nick-to-nick distance is about 4-7 nucleotides. In some embodiments, the nick-to-nick distance is 4, 5, 6, or 7 nucleotides. In some embodiments, the nick-to-nick distance is about 41-96 nucleotides. In some embodiments, the nick-to-nick distance is about 41-82 nucleotides. In some embodiments, the nick-to-nick distance is about 41-44 nucleotides. In some embodiments, the nick-to-nick distance is about 44-82 nucleotides. In some embodiments, the nick-to-nick distance is about 44-96 nucleotides. In some embodiments, the nick-to-nick distance is about 82-96 nucleotides. In some embodiments, the nick-to-nick distance is 41, 44, 82, or 96 nucleotides. In some embodiments, the intended nucleotide edit is incorporated within about 1-10 nucleotides of the position corresponding to the PAM of the ng search target sequence.

[0266] In some embodiments, a PEgRNA (or ngRNA) comprises an additional secondary structure at the 5′ end. In some embodiments, a PEgRNA (or ngRNA) comprises an additional secondary structure at the 3′ end.

[0267] In some embodiments, the secondary structure comprises a pseudoknot. In some embodiments, the secondary structure comprises a pseudoknot derived from a virus. In some embodiments, the secondary structure comprises a pseudoknot of a Moloney murine leukemia virus (M-MLV) genome (a mpknot). In some embodiments, the secondary structure comprises a nucleotide sequence selected from the group consisting of
[0268] GGGUCAGGAGCCCCCCCCCUGAACCCAGGAUAACCCUCAAAGUCGGGGGGCAACC (SEQ ID NO: 3762),
[0269] GUCAGGGUCAGGAGCCCCCCCCCUGAACCCAGGAUAACCCUCAAAGUCGGGGGGCAACCC (SEQ ID NO: 3763),
[0270] GGGUCAGGAGCCCCCCCCCUGAACCCAGGAAAACCCUCAAAGUCGGGGGGCAACCC (SEQ ID NO: 3764),
[0271] GGGUCAGGAGCCCCCCCCCUGCACCCAGGAAAACCCUCAAAGUCGGGGGGCAACCC (SEQ ID NO: 3765),
[0272] GGGUCAGGAGCCCCCCCCCUGCACCCAGGAUAACCCUCAAAGUCGGGGGGCAACCC (SEQ ID NO: 3766),
[0273] GUCAGGGUCAGGAGCCCCCCCCCUGAACCCAGGAAAACCCUCAAAGUCGGGGGGCAACCC (SEQ ID NO: 3767),
[0274] GUCAGGGUCAGGAGCCCCCCCCCUGCACCCAGGAAAACCCUCAAAGUCGGGGGGCAACCC (SEQ ID NO: 3768), and
[0275] GGGUCAGGAGCCCCCCCCCUGAACCCAGGAUAACCCUCAAAGUCGGGGGGC (SEQ ID NO: 3769), or a nucleotide sequence having at least 80%, 85%, 90%, 95%, 96%, 97%, 98%, or 99% sequence identity therewith. In some embodiments, the secondary structure comprises a nucleotide sequence of GGGUCAGGAGCCCCCCCCCUGAACCCAGGAUAACCCUCAAAGUCGGGGGGC (SEQ ID NO: 3769), or a nucleotide sequence having at least 80%, 85%, 90%, 95%, 96%, 97%, 98%, or 99% sequence identity therewith.

[0276] In some embodiments, the secondary structure comprises a quadruplex. In some embodiments, the secondary structure comprises a G-quadruplex. In some embodiments, the secondary structure comprises a nucleotide sequence selected from the group consisting of gq2(UGGUGGUGGUGGU) (SEQ ID NO: 3770), stk40(GGGACAGGGCAGGGACAGGG) (SEQ ID NO: 3771), apc2(GGGUCCGGGUCUGGGUCUGGG) (SEQ ID NO: 3772), stard3(GGGCAGGGUCUGGGCUGGG) (SEQ ID NO: 3773), tnsl(GGGCUGGGAUGGGAAAGGG) (SEQ ID NO: 3774), ceacam4(GGGCUCUGGGUGGGCCGGG) (SEQ ID NO: 3775), erc1(GGGCUGGGCUGGGCAGGG) (SEQ ID NO: 3776), pitpnm3(GGGUGGGCUGGGAAGGG) (SEQ ID NO: 3777), rlf(GGGAGGGAGGGCUAGGG) (SEQ ID NO: 3778), ube3c(GGGCAGGGCUGGGAGGG) (SEQ ID NO: 3779), tafl5(GGGUGGGAGGGCUGGG) (SEQ ID NO: 3780), and xrnl(GCGUAACCUCCAUCCGAGUUGCAAGAGAGGGAAACGCAGUCUC) (SEQ ID NO: 3781), or a nucleotide sequence having at least 80%, 85%, 90%, 95%, 96%, 97%, 98%, or 99% sequence identity therewith.

[0277] In some embodiments, the secondary structure comprises a P4-P6 domain of a Group I intron. In some embodiments, the secondary structure comprises the nucleotide sequence of GGAAUUGCGGGAAAGGGGUCAACAGCCGUUCAGUACCAAGUCUCAGGGGAAACUUUGAG AUGGCCUUGCAAAGGGUAUGGUAAUAAGCUGACGGACAUGGUCCUAACCACGCAGCCAAG UCCUAAGUCAACAGAUCUUCUGUUGAUAUGGAUGCAGUUCA (SEQ ID NO: 3782), or a nucleotide sequence having at least 80%, 85%, 90%, 95%, 96%, 97%, 98%, or 99% sequence identity therewith.

[0278] In some embodiments, the secondary structure comprises a riboswitch aptamer. In some embodiments, the secondary structure comprises a riboswitch aptamer derived from a prequeosine-1 riboswitch aptamer. In some embodiments, the secondary structure comprises a modified prequeosine-1 riboswitch aptamer. In some embodiments, the secondary structure comprises a nucleotide sequence selected from the group consisting of UUGACGCGGUUCUAUCUAGUUACGCGUUAAACCAACUAGAAA (SEQ ID NO: 3783), UUGACGCGGUUCUAUCUACUUACGCGUUAAACCAACUAGAAA (SEQ ID NO: 3784), CGCGAGUCUAGGGGAUAACGCGUUAAACUUCCUAGAAGGCGGUU (SEQ ID NO: 3785), CGCGGAUCUAGAUUGUAACGCGUUAAACCAUCUAGAAGGCGGUU (SEQ ID NO: 3786), CGCGUCGCUACCGCCCGGCGCGUUAAACACACUAGAAGGCGGUU (SEQ ID NO: 3787), and CGCGGUUCUAUCUAGUUACGCGUUAAACCAACUAGAA (SEQ ID NO: 3788), or a nucleotide sequence having at least 80%, 85%, 90%, 95%, 96%, 97%, 98%, or 99% sequence identity therewith. In some embodiments, the secondary structure comprises a nucleotide sequence selected from the group consisting of UUGACGCGGUUCUAUCUAGUUACGCGUUAAACCAACUAGAAA (SEQ ID NO: 3783), CGCGAGUCUAGGGGAUAACGCGUUAAACUUCCUAGAAGGCGGUU (SEQ ID NO: 3785), CGCGGAUCUAGAUUGUAACGCGUUAAACCAUCUAGAAGGCGGUU (SEQ ID NO: 3786), CGCGUCGCUACCGCCCGGCGCGUUAAACACACUAGAAGGCGGUU (SEQ ID NO: 3787), and CGCGGUUCUAUCUAGUUACGCGUUAAACCAACUAGAA (SEQ ID NO: 3788), or a nucleotide sequence having at least 80%, 85%, 90%, 95%, 96%, 97%, 98%, or 99% sequence identity therewith. In some embodiments, the secondary structure comprises a nucleotide sequence CGCGGUUCUAUCUAGUUACGCGUUAAACCAACUAGAA (SEQ ID NO: 3788), or a nucleotide sequence having at least 80%, 85%, 90%, 95%, 96%, 97%, 98%, or 99% sequence identity therewith.

[0279] In some embodiments, a PEgRNA comprises a linker. In some embodiments, the secondary structure or a 3′ motif is linked to one or more other component of a PEgRNA via a linker. For example, in some embodiments, the secondary structure is at the 3′ end of the PEgRNA (e.g., a RTT, or a PBS) and is linked to the 3′ end of a PBS via a linker. For example, in some embodiments, a 3′ motif is at the 3′ end of the PEgRNA and is linked to the 3′ end of a PEgRNA (e.g., a RTT or a PBS) via a linker. In some embodiments, the secondary structure or a 5′ motif is at the 5′ end of the PEgRNA and is linked to the 5′ end of a spacer via a linker. In some embodiments, the linker is a nucleotide linker that is 1, 2, 3, 4, 5, 6, 7, 8, 9, 10, 11, 12, 13, 14, 15, 16, 17, 18, 19, 20, 21, 22, 23, 24, 25, 26, 27, 28, 29, 30, 31, 32, 33, 34, 35, 36, 37, 38, 39, 40, 41, 42, 43, 44, 45, 46, 47, 48, 49, or 50 nucleotides in length. In some embodiments, the linker is 5 to 10 nucleotides in length. In some embodiments, the linker is 10 to 20 nucleotides in length. In some embodiments, the linker is 15 to 25 nucleotides in length. In some embodiments, the linker is 8 nucleotides in length.

[0280] In some embodiments, the linker is designed to minimize base pairing between the linker and another component of the PEgRNA. In some embodiments, the linker is designed to minimize base pairing between the linker and the spacer. In some embodiments, the linker is designed to minimize base pairing between the linker and the PBS. In some embodiments, the linker is designed to minimize base pairing between the linker and the editing template. In some embodiments, the linker is designed to minimize base pairing between the linker and the sequence of the RNA secondary structure. In some embodiments, the linker is optimized to minimize base pairing between the linker and another component of the PEgRNA, in order of the following priority: spacer, PBS, editing template and then scaffold. In some embodiments, base paring probability is calculated using ViennaRNA 2.0,as described in Lorenz, R. et al. ViennaRNA package 2.0. Algorithms Mol. Biol. 6, incorporated by reference in its entirety herein, under standard parameters (37° C., 1 M NaCl, 0.05 M MgCl2).

[0281] In some embodiments, the PEgRNA comprises a RNA secondary structure and/or a linker disclosed in Nelson et al. Engineered pegRNAs improve prime editing efficiency. Nat Biotechnol. (2021), the entirety of which is incorporated herein by reference.

[0282] In some embodiments, a PEgRNA is transcribed from a nucleotide encoding the PEgRNA, for example, a DNA plasmid encoding the PEgRNA. In some embodiments, the PEgRNA comprises a self-cleaving element. In some embodiments, the self-cleaving element improves transcription and/or processing of the PEgRNA when transcribed form the nucleotide encoding the PEgRNA. In some embodiments, the PEgRNA comprises a hairpin or a RNA quadruplex. In some embodiments, the PEgRNA comprises a self-cleaving ribozyme element, for example, a hammerhead, a pistol, a hatchet, a hairpin, a VS, a twister, or a twister sister ribozyme. In some embodiments, the PEgRNA comprises a HDV ribozyme. In some embodiments, the PEgRNA comprises a hairpin recognized by Csy4. In some embodiments, the PEgRNA comprises an ENE motif. In some embodiments, the PEgRNA comprises an element for nuclear expression (ENE) from MALATI Inc RNA. In some embodiments, the PEgRNA comprises an ENE element from Kaposi's sarcoma-associated herpesvirus (KSHV). In some embodiments, the PEgRNA comprises a 3′ box of a U1 snRNA. In some embodiments, the PEgRNA forms a circular RNA.

[0283] In some embodiments, the PEgRNA comprises a RNA secondary structure or a motif that improves binding to the DNA-RNA duple or enhances PEgRNA activity. In some embodiments, the PEgRNA comprises a sequence derived from a native nucleotide element involved in reverse transcription, e.g., initiation of retroviral transcription. In some embodiments, the PEgRNA comprises a sequence of, or derived from, a primer binding site of a substrate of a reverse transcriptase, a polypurine tract (PPT), or a kissing loop. In some embodiments, the PEgRNA comprises a dimerization motif, a kissing loop, or a GNRA tetraloop—tetraloop receptor pair that results in circularization of the PEgRNA. In some embodiments, the PEgRNA comprises a RNA secondary structure of a motif that results in physical separation of the spacer and the PBS of the PEgRNA, thereby prevents occlusion of the spacer and improves PEgRNA activity. In some embodiments, the PEgRNA comprises a secondary structure or motif, e.g., a 5′ or 3′ extension in the spacer region that form a toehold or hairpin, wherein the secondary structure or motif competes favorably against annealing between the spacer and the PBS of the PEgRNA, thereby prevents occlusion of the spacer and improves PEgRNA activity.

[0284] In some embodiments, a PEgRNA comprises the sequence GGCCGGCAUGGUCCCAGCCUCCUCGCUGGCGCCGGCUGGGCAACAUGCUUCGGCAUGGCGA AUGGGAC (SEQ ID NO: 3789) at the 3′ end. In some embodiments, a PEgRNA comprises the structure [spacer]-[gRNA core]-[editing template]-[PBS]-GGCCGGCAUGGUCCCAGCCUCCUCGCUGGCGCCGGCUGGGCAACAUGCUUCGGCAUGGCGA AUGGGAC (SEQ ID NO: 3789), or [spacer]-[gRNA core]-[editing template]-[PBS]-GGCCGGCAUGGUCCCAGCCUCCUCGCUGGCGCCGGCUGGGCAACAUGCUUCGGCAUGGCGA AUGGGAC-(U)n (SEQ ID NO: 3801), wherein n is an integer between 3 and 7. The structure derived from hepatitis D virus (HDV) is italicized.

[0285] In some embodiments, the PEgRNA comprises the sequence GGUGGGAGACGUCCCACC (SEQ ID NO: 3790) at the 5′ end and/or the sequence UGGGAGACGUCCCACC (SEQ ID NO: 3802) at the 3′ end. In some embodiments, the PEgRNA comprises the following structure (M-MLV kissing loop): GGUGGGAGACGUCCCACC (SEQ ID NO: 3790)-[spacer]-[gRNA core]-[editing template]-[PBS]-UGGGAGACGUCCCACC (SEQ ID NO: 3802), or GGUGGGAGACGUCCCACC (SEQ ID NO: 3790)-[spacer]-[gRNA core]-[editing template]-[PBS]-UGGGAGACGUCCCACC-(U)n (SEQ ID NO: 3803), wherein n is an integer between 3 and 7. The kissing loop structure is italicized.

[0286] In some embodiments, the PEgRNA comprises the sequence GAGCAGCAUGGCGUCGCUGCUCAC (SEQ ID NO: 3791) at the 5′ end and/or the sequence CCAUCAGUUGACACCCUGAGG (SEQ ID NO: 3792) at the 3′ end. In some embodiments, the PEgRNA comprises the following structure (VS ribozyme kissing loop):
[0287] GAGCAGCAUGGCGUCGCUGCUCAC (SEQ ID NO: 3791)-[spacer]-[gRNA core]-[editing template]-[PBS]-CCAUCAGUUGACACCCUGAGG (SEQ ID NO: 3792), or GAGCAGCAUGGCGUCGCUGCUCAC (SEQ ID NO: 3791)-[spacer]-[gRNA core]-[editing template]-[PBS]-CCAUCAGUUGACACCCUGAGG-(U)n (SEQ ID NO: 3804), wherein n is an integer between 3 and 7. (VS ribozyme kissing loop)

[0288] In some embodiments, the PEgRNA comprises the sequence GCAGACCUAAGUGGUGACAUAUGGUCUG (SEQ ID NO: 3793) at the 5′ end and/or the sequence CAUGCGAUUAGAAAUAAUCGCAUG (SEQ ID NO: 3794) at the 3′ end. In some embodiments, the PEgRNA comprises the following structure (tetraloop and receptor): GCAGACCUAAGUGGUGACAUAUGGUCUG (SEQ ID NO: 3793)-[spacer]-[gRNA core]-[editing template]-[PBS]-CAUGCGAUUAGAAAUAAUCGCAUG (SEQ ID NO: 3794), or GCAGACCUAAGUGGUGACAUAUGGUCUG (SEQ ID NO: 3793)-[spacer]-[gRNA core]-[editing template]-[PBS]-CAUGCGAUUAGAAAUAAUCGCAUG-(U)n (SEQ ID NO: 3805), wherein n is an integer between 3 and 7. The tetraloop/tetraloop receptor structure is italicized.

[0289] In some embodiments, the PEgRNA comprises the sequence

(SEQ ID NO: 3789)
GGCCGGCAUGGUCCCAGCCUCCUCGCUGGCGCCGGCUGGGCAACAUGCU
UCGGCAUGGCGAAUGGGAC
or
(SEQ ID NO: 3795)
UCUGCCAUCAAAGCUGCGACCGUGCUCAGUCUGGUGGGAGACGUCCCAC
CGGCCGGCAUGGUCCCAGCCUCCUCGCUGGCGCCGGCUGGGCAACAUGC
UUCGGCAUGGCGAAUGGGAC.

[0290] In some embodiments, a PEgRNA comprises a gRNA core that comprises a modified direct repeat compared to the sequence of a naturally occurring CRISPR-Cas guide RNA scaffold, for example, a Cas9 gRNA scaffold. In some embodiments, the PEgRNA comprises a “flip and extension (F+E)” gRNA core, wherein one or more base pairs in a direct repeat is modified. In some embodiments, the PEgRNA comprises a first direct repeat (the first paring element or the lower stem), wherein a Uracil is changed to a Adenine (such that in the stem region, a U-A base pair is changed to a A-U base pair). In some embodiments, the PEgRNA comprises a first direct repeat wherein the fourth U-A base pair in the stem is changed to a A-U base pair. In some embodiments, the PEgRNA comprises a first direct repeat wherein one or more U-A base pair is changed to a G-C or C-G base pair. For example, in some embodiments, the PEgRNA comprises a first direct repeat comprising a modification to a GUUUU-AAAAC pairing element, wherein one or more of the U-A base pairs is changed to a A-U base pair, a G-C base pair, or a C-G base pair. In some embodiments, the PEgRNA comprises an extended first direct repeat.

[0291] In some embodiments, a PEgRNA comprises a gRNA core comprises the sequence

(SEQ ID NO: 3796)
GUUUUAGAGCUAUACGUAGCAAGUUAAAAUAAGGCUAGUCCGUUAUCAA
CUUUACGAAGUGGCACCGAGUCGGUGC
or
(SEQ ID NO: 3797)
GUUUUAGAGCUAUACGUAGCAAGUUAAAAUAAGGCUAGUCCGUUAUCAA
CUUUACGAAGUGGGACCGAGUCGGUCC.

[0292] In some embodiments, a PEgRNA comprises a gRNA core comprising the sequence

(SEQ ID NO: 3798)
GUUUUAGAGCUAGCUCAUGAAAAUGAGCUAGCAAGUUAAAAUAAGGCUA
GUCCGUUAUCAACUUGAAAAAGUGGGACCGAGUCGGUCC.

[0293] In some embodiments, a PEgRNA comprises a gRNA core comprising the sequence

(SEQ ID NO: 3667)
GUUUGAGAGCUAGAAAUAGCAAGUUUAAAUAAGGCUAGUCCGUUAUCAA
CUUGAAAAAGUGGGACCGAGUCGGUCC.

[0294] In some embodiments, a PEgRNA comprises a gRNA core comprising the sequence GUUUAAGAGCUAGAAAUAGCAAGUUUAAAUAAGGCUAGUCCGUUAUCAACUUGAAAAAG UGGCACCGAGUCGGUGC (SEQ ID NO: 3799). In some embodiments, a PEgRNA comprise a gRNA core comprising the sequence GUUUUAGAGCUAUGCUGGAAACAGCAUAGCAAGUUAAAAUAAGGCUAGUCCGUUAUCAA CUUGAAAAAGUGGCACCGAGUCGGUGC (SEQ ID NO: 3800). In some embodiments, a PEgRNA comprise a gRNA core comprising the sequenceGUUUAAGAGCUAUGCUGGAAACAGCAUAGCAAGUUUAAAUAAGGCUAGUCCGUU AUCAACUUGAAAAAGUGGCACCGAGUCGGUGC (SEQ ID NO: 3668).

[0295] In some embodiments, the PEgRNA and/or ngRNA comprises a gRNA core that comprises a nucleic acid sequence selected from Table 62 below. In some embodiments, the PEgRNA and/or ngRNA comprises a gRNA core that comprises a nucleic acid sequence that has at least about 50%, 55%, 60%, 65%, 70%, 75%, 80%, 85%, 90%, 95%, 96%, 97%, 98%, or 99% sequence identity to any one of SEQ ID NOs: 3666-3670 or 3796-3800. In some embodiments, the PEgRNA and/or ngRNA comprises a gRNA core that comprises a nucleic acid sequence selected from the group consisting of SEQ ID NOs: 3666-3670 or 3796-3800. In some embodiments, the PEgRNA and/or ngRNA comprises a gRNA core that comprises a nucleic acid sequence of SEQ ID NO: 3666. In some embodiments, the PEgRNA and/or ngRNA comprises a gRNA core that comprises a nucleic acid sequence of SEQ ID NO: 3667. In some embodiments, the PEgRNA and/or ngRNA comprises a gRNA core that comprises a nucleic acid sequence of SEQ ID NO: 3668. In some embodiments, the PEgRNA and/or ngRNA comprises a gRNA core that comprises a nucleic acid sequence of SEQ ID NO: 3669. In some embodiments, the PEgRNA and/or ngRNA comprises a gRNA core that comprises a nucleic acid sequence of SEQ ID NO: 3670.

[0296] Table: 62: lists exemplary nucleic acid sequences of gRNA core (gRNA scaffold). The sequences in Table 62 below are annotated with SEQ ID NO as required by ST.26 standard. Although all the sequences provided in Table 62 are RNA sequences, “T” is used instead of a “U” in the sequences for consistency with the ST.26 standard.

TABLE 62
Exemplary nucleic acid sequences of gRNA core (gRNA scaffold)

| SEQ | | |
|---|---|---|
| ID | | |
| NO: | Nucleic acid sequence of gRNA core or scaffold | Remarks |
| 3666 | GTTTTAGAGCTAGAAATAGCAAGTTAAAATAAGGCTAGTCCGTTA | SpCas9 |
| | TCAACTTGAAAAAGTGGCACCGAGTCGGTGC | scaffold |
| 3667 | GTTTGAGAGCTAGAAATAGCAAGTTTAAATAAGGCTAGTCCGTTA | |
| | TCAACTTGAAAAAGTGGGACCGAGTCGGTCC | |
| 3668 | GTTTAAGAGCTATGCTGGAAACAGCATAGCAAGTTTAAATAAGGC | |
| | TAGTCCGTTATCAACTTGAAAAAGTGGCACCGAGTCGGTGC | |
| 3669 | GTTTTAGTACTCTGGAAACAGAATCTACTAAAACAAGGCAAAATG | SaCas9 |
| | CCGTGTTTATCTCGTCAACTTGTTGGCGAGA | gRNA core |
| 3670 | GTTTTAGTACTCTGGAAACAGAATCTACTGAAACAAGACAATATG | SluCas9 |
| | TCGTGTTTATCCCATCAATTTATTGGTGGGA | gRNA core |

[0297] A PEgRNA and/or an ngRNA of this disclosure, in some embodiments, may include modified nucleotides, e.g., chemically modified DNA or RNA nucleobases, and may include one or more nucleobase analogs (e.g., modifications which might add functionality, such as temperature resilience). In some embodiments, PEgRNAs and/or ngRNAs as described herein may be chemically modified. The phrase “chemical modifications,” as used herein, can include modifications which introduce chemistries which differ from those seen in naturally occurring DNA or RNAs, for example, covalent modifications such as the introduction of modified nucleotides, (e.g., nucleotide analogs, or the inclusion of pendant groups which are not naturally found in DNA or RNA molecules).

[0298] In some embodiments, the PEgRNAs provided in the disclosure may further comprise nucleotides added to the 5′ of the PEgRNAs. In some embodiments, the PEgRNA further comprises 1, 2, or 3 additional nucleotides added to the 5′ end. The additional nucleotides can be guanine, cytosine, adenine, or uracil. In some embodiments, the additional nucleotide at the 5′ end of the PEgRNA is a guanine or cytosine. In some embodiments, the additional nucleotides can be chemically or biologically modified.

[0299] In some embodiments, the PEgRNAs provided in the disclosure may further comprise nucleotides to the 3′ of the PEgRNAs. In some embodiments, the PEgRNA further comprises 1, 2, or 3 additional nucleotides to the 3′ end. The additional nucleotides can be guanine, cytosine, adenine, or uracil. In some embodiments, the additional nucleotides at the 3′ end of the PEgRNA is a polynucleotide comprising at least 1 uracil. In some embodiments, the additional nucleotides can be chemically or biologically modified.

[0300] In some embodiments, a PEgRNA or ngRNA is produced by transcription from a template nucleotide, for example, a template plasmid. In some embodiments, a polynucleotide encoding the PEgRNA or ngRNA is appended with one or more additional nucleotides that improves PEgRNA or ngRNA function or expression, e.g., expression from a plasmid that encodes the PEgRNA or ngRNA. In some embodiments, a polynucleotide encoding a PEgRNA or ngRNA is appended with one or more additional nucleotides at the 5′ end or at the 3′ end. In some embodiments, the polynucleotide encoding the PEgRNA or ngRNA is appended with a guanine at the 5′ end, for example, if the first nucleotide at the 5′ end of the spacer is not a guanine. In some embodiments, a polynucleotide encoding the PEgRNA or ngRNA is appended with nucleotide sequence CACC at the 5′ end. In some embodiments, the polynucleotide encoding the PEgRNA or ngRNA is appended with an additional nucleotide adenine at the 3′ end, for example, if the last nucleotide at the 3′ end of the PBS is a Thymine. In some embodiments, the polynucleotide encoding the PEgRNA or ngRNA is appended with additional nucleotide sequence TTTTTT, TTTTTTT, TTTTT, or TTTT at the 3′ end. In some embodiments, the PEgRNA or ngRNA comprises the appended nucleotides from the transcription template. In some embodiments, the PEgRNA or ngRNA further comprises one or more nucleotides at the 5′ end or the 3′ end in addition to spacer, PBS, and RTT sequences. in some embodiments, the PEgRNA or ngRNA further comprises a guanine at the 5′ end, for example, when the first nucleotide at the 5′ end of the spacer is not a guanine. In some embodiments, the PEgRNA or ngRNA further comprises nucleotide sequence CACC at the 5′ end. In some embodiments, the PEgRNA or ngRNA further comprises an adenine at the 3′ end, for example, if the last nucleotide at the 3′ end of the PBS is a thymine. In some embodiments, the PEgRNA or ngRNA further comprises nucleotide sequence UUUUUUU, UUUUUU, UUUUU, or UUUU at the 3′ end.

[0301] In some embodiments, the PEgRNAs and/or ngRNAs provided in this disclosure may have undergone a chemical or biological modifications. Modifications may be made at any position within a PEgRNA or ngRNA, and may include modification to a nucleobase or to a phosphate backbone of the PEgRNA or ngRNA. In some embodiments, chemical modifications can be a structure guided modifications. In some embodiments, a chemical modification is at the 5′ end and/or the 3′ end of a PEgRNA. In some embodiments, a chemical modification is at the 5′ end and/or the 3′ end of a ngRNA. In some embodiments, a chemical modification can be within the spacer sequence, the extension arm, the editing template sequence, or the primer binding site of a PEgRNA. In some embodiments, a chemical modification may be within the spacer sequence or the gRNA core of a PEgRNA or a ngRNA. In some embodiments, a chemical modification can be within the 3′ most nucleotides of a PEgRNA or ngRNA. In some embodiments, a chemical modification can be within the 3′ most end of a PEgRNA or ngRNA comprises 1, 2, 3, 4, 5, 6, 7, 8, 9, 10 or more chemically modified nucleotides at the 3′ end. In some embodiments, a PEgRNA or ngRNA comprises 3 contiguous chemically modified nucleotides at the 3′ end. In some embodiments, a chemical modification can be within the 5′ most end of a PEgRNA or ngRNA. In some embodiments, a PEgRNA or ngRNA comprises 1, 2, 3, 4, 5, 6, 7, 8, 9, 10 or more chemically modified nucleotides at the 3′ end. In some embodiments, a PEgRNA or ngRNA comprises 1, 2, 3, 4, 5, 6, 7, 8, 9, 10 or more chemically modified nucleotides at the 5′ end. In some embodiments, a PEgRNA or ngRNA comprises 1, 2, 3, 4, or 5 or more chemically modified nucleotides at the 3′ end. In some embodiments, a PEgRNA or ngRNA comprises 1, 2, 3, 4, or 5 more chemically modified nucleotides at the 5′ end. In some embodiments, a PEgRNA or ngRNA comprises 1, 2, or 3 or more chemically modified nucleotides at the 3′ end. In some embodiments, a PEgRNA or ngRNA comprises 1, 2, or 3 more chemically modified nucleotides at the 5′ end. In some embodiments, a PEgRNA or ngRNA comprises 1, 2, 3, 4, 5, 6, 7, 8, 9, 10 or more contiguous chemically modified nucleotides at the 3′ end. In some embodiments, a PEgRNA or ngRNA comprises 1, 2, 3, 4, 5, 6, 7, 8, 9, 10 or more contiguous chemically modified nucleotides at the 5′ end. In some embodiments, a PEgRNA or ngRNA comprises 1, 2, 3, 4, or 5 contiguous chemically modified nucleotides at the 3′ end. In some embodiments, a PEgRNA or ngRNA comprises 1, 2, 3, 4, or 5 contiguous chemically modified nucleotides at the 5′ end. In some embodiments, a PEgRNA or ngRNA comprises 1, 2, or 3 contiguous chemically modified nucleotides at the 3′ end. In some embodiments, a PEgRNA or ngRNA comprises 1, 2, or 3 contiguous chemically modified nucleotides at the 5′ end. In some embodiments, a PEgRNA or ngRNA comprises 3 contiguous chemically modified nucleotides at the 3′ end. In some embodiments, a PEgRNA or ngRNA comprises 1, 2, 3, 4, 5, or more chemically modified nucleotides near the 3′ end. In some embodiments, a PEgRNA or ngRNA comprises 3 contiguous chemically modified nucleotides at the 3′ end. In some embodiments, a PEgRNA or ngRNA comprises 3 contiguous chemically modified nucleotides at the 5′ end. In some embodiments, a PEgRNA or ngRNA comprises 1, 2, 3, 4, 5, or more chemically modified nucleotides near the 3′ end. In some embodiments, a PEgRNA or ngRNA comprises 1, 2, 3, 4, 5, or more contiguous chemically modified nucleotides near the 3′ end. In some embodiments, a PEgRNA or ngRNA comprises 1, 2, 3, 4, 5, or more chemically modified nucleotides near the 3′ end, where the 3′ most nucleotide is not modified, and the 1, 2, 3, 4, 5, or more chemically modified nucleotides precede the 3′ most nucleotide in a 5′-to-3′ order. In some embodiments, a PEgRNA or ngRNA comprises 1, 2, 3, 4, 5, 6, 7, 8, 9, 10, 11, 12, 13, 14, 15, 16, 17, 18, 19, 20, 21, 22, 23, 24, 25, 26, 27, 28, 29, 30, 31, 32, 33, 34, 35 or more chemically modified nucleotides near the 3′ end, where the 3′ most nucleotide is not modified, and the 1, 2, 3, 4, 5, 6, 7, 8, 9, 10, 11, 12, 13, 14, 15, 16, 17, 18, 19, 20, 21, 22, 23, 24, 25, 26, 27, 28, 29, 30, 31, 32, 33, 34, 35 or more chemically modified nucleotides precede the 3′ most nucleotide in a 5′-to-3′ order.

[0302] In some embodiments, a PEgRNA or ngRNA comprises one or more chemical modified nucleotides in the gRNA core. As exemplified in FIG. 3, the gRNA core of a PEgRNA may comprise one or more regions of a base paired lower stem, a base paired upper stem, where the lower stem and upper stem may be connected by a bulge comprising unpaired RNAs. The gRNA core may further comprise a nexus distal from the spacer sequence. In some embodiments, the gRNA core comprises one or more chemically modified nucleotides in the lower stem, upper stem, and/or the hairpin regions. In some embodiments, all of the nucleotides in the lower stem, upper stem, and/or the hairpin regions are chemically modified.

[0303] A chemical modification to a PEgRNA or ngRNA can comprise a 2′-O-thionocarbamate-protected nucleoside phosphoramidite, a 2′-O-methyl (M), a 2′-O-methyl 3′phosphorothioate (MS), or a 2′-O-methyl 3′thioPACE (MSP), or any combination thereof. In some embodiments, a chemically modified PEgRNA and/or ngRNA can comprise a ′-O-methyl (M) RNA, a 2′-O-methyl 3′phosphorothioate (MS) RNA, a 2′-O-methyl 3′thioPACE (MSP) RNA, a 2′-F RNA, a phosphorothioate bond modification, any other chemical modifications known in the art, or any combination thereof. A chemical modification can also include, for example, the incorporation of non-nucleotide linkages or modified nucleotides into the PEgRNA and/or ngRNA (e.g., modifications to one or both of the 3′ and 5′ ends of a guide RNA molecule). Such modifications can include the addition of bases to an RNA sequence, complexing the RNA with an agent (e.g., a protein or a complementary nucleic acid molecule), and inclusion of elements which change the structure of an RNA molecule (e.g., which form secondary structures).

### Prime Editing Compositions

[0304] Disclosed herein, in some embodiments, are compositions, systems, and methods using a prime editing composition. The term “prime editing composition” or “prime editing system” refers to compositions involved in the method of prime editing as described herein. A prime editing composition may include a prime editor, e.g., a prime editor fusion protein, and a PEgRNA. A prime editing composition may further comprise additional elements, such as second strand nicking ngRNAs. Components of a prime editing composition may be combined to form a complex for prime editing, or may be kept separately, e.g., for administration purposes.

[0305] In some embodiments, a prime editing composition comprises a prime editor fusion protein complexed with a PEgRNA and optionally complexed with a ngRNA. In some embodiments, the prime editing composition comprises a prime editor comprising a DNA binding domain and a DNA polymerase domain associated with each other through a PEgRNA. For example, the prime editing composition may comprise a prime editor comprising a DNA binding domain and a DNA polymerase domain linked to each other by an RNA-protein recruitment aptamer RNA sequence, which is linked to a PEgRNA. In some embodiments, a prime editing composition comprises a PEgRNA and a polynucleotide, a polynucleotide construct, or a vector that encodes a prime editor fusion protein.

[0306] In some embodiments, a prime editing composition comprises a PEgRNA, a ngRNA, and a polynucleotide, a polynucleotide construct, or a vector that encodes a prime editor fusion protein. In some embodiments, a prime editing composition comprises multiple polynucleotides, polynucleotide constructs, or vectors, each of which encodes one or more prime editing composition components. In some embodiments, the PEgRNA of a prime editing composition is associated with the DNA binding domain, e.g., a Cas9 nickase, of the prime editor. In some embodiments, the PEgRNA of a prime editing composition complexes with the DNA binding domain of a prime editor and directs the prime editor to the target DNA.

[0307] In some embodiments, a prime editing composition comprises one or more polynucleotides that encode prime editor components and/or PEgRNA or ngRNAs. In some embodiments, a prime editing composition comprises a polynucleotide encoding a fusion protein comprising a DNA binding domain and a DNA polymerase domain. In some embodiments, a prime editing composition comprises (i) a polynucleotide encoding a fusion protein comprising a DNA binding domain and a DNA polymerase domain, and (ii) a PEgRNA or a polynucleotide encoding the PEgRNA. In some embodiments, a prime editing composition comprises (i) a polynucleotide encoding a fusion protein comprising a DNA binding domain and a DNA polymerase domain, (ii) a PEgRNA or a polynucleotide encoding the PEgRNA, and (iii) an ngRNA or a polynucleotide encoding the ngRNA. In some embodiments, a prime editing composition comprises (i) a polynucleotide encoding a DNA binding domain of a prime editor, e.g., a Cas9 nickase, (ii) a polynucleotide encoding a DNA polymerase domain of a prime editor, e.g., a reverse transcriptase, and (iii) a PEgRNA or a polynucleotide encoding the PEgRNA. In some embodiments, a prime editing composition comprises (i) a polynucleotide encoding a DNA binding domain of a prime editor, e.g., a Cas9 nickase, (ii) a polynucleotide encoding a DNA polymerase domain of a prime editor, e.g., a reverse transcriptase, (iii) a PEgRNA or a polynucleotide encoding the PEgRNA, and (iv) an ngRNA or a polynucleotide encoding the ngRNA.

[0308] In some embodiments, the polynucleotide encoding the DNA biding domain or the polynucleotide encoding the DNA polymerase domain further encodes an additional polypeptide domain, e.g., an RNA-protein recruitment domain, such as a MS2 coat protein domain. In some embodiments, a prime editing composition comprises (i) a polynucleotide encoding a N-terminal half of a prime editor fusion protein and an intein-N and (ii) a polynucleotide encoding a C-terminal half of a prime editor fusion protein and an intein-C. In some embodiments, a prime editing composition comprises (i) a polynucleotide encoding a N-terminal half of a prime editor fusion protein and an intein-N(ii) a polynucleotide encoding a C-terminal half of a prime editor fusion protein and an intein-C, (iii) a PEgRNA or a polynucleotide encoding the PEgRNA, and/or (iv) an ngRNA or a polynucleotide encoding the ngRNA. In some embodiments, a prime editing composition comprises (i) a polynucleotide encoding a N-terminal portion of a DNA binding domain and an intein-N, (ii) a polynucleotide encoding a C-terminal portion of the DNA binding domain, an intein-C, and a DNA polymerase domain. In some embodiments, the DNA binding domain is a Cas protein domain, e.g., a Cas9 nickase. In some embodiments, the prime editing composition comprises (i) a polynucleotide encoding a N-terminal portion of a DNA binding domain and an intein-N, (ii) a polynucleotide encoding a C-terminal portion of the DNA binding domain, an intein-C, and a DNA polymerase domain, (iii) a PEgRNA or a polynucleotide encoding the PEgRNA, and/or (iv) a ngRNA or a polynucleotide encoding the ngRNA.

[0309] In some embodiments, a prime editing system comprises one or more polynucleotides encoding one or more prime editor polypeptides, wherein activity of the prime editing system can be temporally regulated by controlling the timing in which the vectors are delivered. For example, in some embodiments, a polynucleotide encoding the prime editor and a polynucleotide encoding a PEgRNA can be delivered simultaneously. For example, in some embodiments, a polynucleotide encoding the prime editor and a polynucleotide encoding a PEgRNA can be delivered sequentially.

[0310] In some embodiments, a polynucleotide encoding a component of a prime editing system can further comprise an element that is capable of modifying the intracellular half-life of the polynucleotide and/or modulating translational control. In some embodiments, the polynucleotide is a RNA, for example, an mRNA. In some embodiments, the half-life of the polynucleotide, e.g., the RNA may be increased. In some embodiments, the half-life of the polynucleotide, e.g., the RNA may be decreased. In some embodiments, the element may be capable of increasing the stability of the polynucleotide, e.g., the RNA. In some embodiments, the element may be capable of decreasing the stability of the polynucleotide, e.g., the RNA. In some embodiments, the element may be within the 3′ UTR of the RNA. In some embodiments, the element may include a polyadenylation signal (PA). In some embodiments, the element may include a cap, e.g., an upstream mRNA or PEgRNA end. In some embodiments, the RNA may comprise no PA such that it is subject to quicker degradation in the cell after transcription.

[0311] In some embodiments, the element may include at least one AU-rich element (ARE). The AREs may be bound by ARE binding proteins (ARE-BPs) in a manner that is dependent upon tissue type, cell type, timing, cellular localization, and environment. In some embodiments the destabilizing element may promote RNA decay, affect RNA stability, or activate translation. In some embodiments, the ARE may comprise 50 to 150 nucleotides in length. In some embodiments, the ARE may comprise at least one copy of the sequence AUUUA. In some embodiments, at least one ARE may be added to the 3′ UTR of the RNA. In some embodiments, the element may be a Woodchuck Hepatitis Virus Posttranscriptional Regulatory Element (WPRE). In further embodiments, the element is a modified and/or truncated WPRE sequence that is capable of enhancing expression from the transcript. In some embodiments, the WPRE or equivalent may be added to the 3′ UTR of the RNA. In some embodiments, the element may be selected from other RNA sequence motifs that are enriched in either fast- or slow-decaying transcripts. In some embodiments, the polynucleotide, e.g., a vector, encoding the PE or the PEgRNA may be self-destroyed via cleavage of a target sequence present on the polynucleotide, e.g., a vector. The cleavage may prevent continued transcription of a PE or a PEgRNA.

[0312] Polynucleotides encoding prime editing composition components can be DNA, RNA, or any combination thereof. In some embodiments, a polynucleotide encoding a prime editing composition component is an expression construct. In some embodiments, a polynucleotide encoding a prime editing composition component is a vector. In some embodiments, the vector is a DNA vector. In some embodiments, the vector is a plasmid. In some embodiments, the vector is a virus vector, e.g., a retroviral vector, adenoviral vector, lentiviral vector, herpesvirus vector, or an adeno-associated virus vector (AAV).

[0313] In some embodiments, polynucleotides encoding polypeptide components of a prime editing composition are codon optimized by replacing at least one codon (e.g. about or more than about 1, 2, 3, 4, 5, 10, 15, 20, 25, 50, or more codons) of the native sequence with codons that are more frequently or most frequently used in the genes of that host cell while maintaining the native amino acid sequence. In some embodiments, a polynucleotide encoding a polypeptide component of a prime editing composition are operably linked to one or more expression regulatory elements, for example, a promoter, a 3′ UTR, a 5′ UTR, or any combination thereof. In some embodiments, a polynucleotide encoding a prime editing composition component is a messenger RNA (mRNA). In some embodiments, the mRNA comprises a Cap at the 5′ end and/or a poly A tail at the 3′ end.

[0314] Unless otherwise indicated, references to nucleotide positions in human chromosomes are as set forth in human genome assembly consortium Human build 38 (GRCh38), GenBank accession GCF_000001405.38.

[0315] Exemplary combinations of PEgRNA components, e.g., spacer, PBS, and editing template/RTT, exemplary full-length PEgRNAs, as well as combinations of PEgRNA and corresponding ngRNA(s) are provided in Tables 1-52. Tables 1-52 each contain three columns. The left column is the sequence number. The middle column provides the sequence of the component, labeled with a SEQ ID NO where required by ST.26 standard. Although all the sequences provided in Tables 1-52 are RNA sequences, “T” is used instead of a “U” in the sequences for consistency with the ST.26 standard. The right column contains a description of the sequence. The RTTs and full-length PEgRNAs in Tables 1-34 are designed to correct a c.67del mutation in the FANCC gene. The RTTs and full length PEgRNAs in Tables 35-52 are designed to correct a c.456+4 A->T mutation. However, the disclosed RTT and full-length PEgRNA are also capable of correcting other mutations in the FANCC gene that are found in the portion of the gene that shares homology or complementarity with the editing template (also referred to as RTT).

[0316] The PEgRNAs exemplified in Tables 1-52 comprise: (a) a spacer comprising at its 3′ end a sequence corresponding to a listed PEgRNA spacer sequence; (b) a gRNA core capable of complexing with a Cas9 protein, and (c) an extension arm comprising: (i) an editing template comprising at its 3′ end any RTT sequence from the same table as the PEgRNA spacer, and (ii) a prime binding site (PBS) comprising at its 5′ end any PBS sequence from the same table as the PEgRNA spacer. The PEgRNA spacers in Tables 1-52 are annotated with their PAM sequence(s), enabling the selection of a prime editor comprising an appropriate Cas9 protein. The editing template can encode wildtype FANCC gene sequence (annotated as simply RTT in Tables 1-52). Alternatively, the editing template can encode one or more synonymous mutations relative to the wildtype FANCC gene, e.g., one or more PAM silencing mutations. RTT encoding synonymous PAM silencing mutations are annotated as such in Tables 1-52 in the third column. In some of Tables 1-52, RTT are further annotated with a * followed by a number code. As described below, a PE3b ngRNA spacer annotated with the same * and number code as an RTT has perfect complementarity to the edit strand post-edit by a PEgRNA containing the RTT.

[0317] The PEgRNA provided in Tables 1-52 can comprise, from 5′ to 3′, the spacer, the gRNA core, the editing template, and the PBS. The 3′ end of the edit template can be contiguous with the 5′ end of the PBS. The PEgRNA can comprise multiple RNA molecules or can be a single RNA molecule. Any of the PEgRNAs of Tables 1-52 can be used in a Prime Editing system further comprising a nick guide RNA (ngRNA). Such a system may be referred to as a PE3 Prime Editing system. The ngRNA can comprise a spacer comprising at its 3′ end a sequence corresponding to nucleotides 4-20 of any ngRNA spacer listed in the same table as the PEgRNA spacer and a gRNA core capable of complexing with a Cas9 protein. For example, the sequence in the spacer of the ngRNA can comprise nucleotides 4-20, 3-20, 2-20, or 1-20 of the listed spacer. In some embodiments, the spacer of the ngRNA is the complete sequence of an ngRNA spacer listed in the same table as the PEgRNA spacer. The ngRNA spacers in Tables 1-52 are annotated with their PAM sequences, enabling selection of an appropriate Cas9 protein. It can be advantageous to select an ngRNA spacer that has a PAM sequence compatible with the Cas9 protein used in the Prime Editor with the PEgRNA, thus avoiding the need to use two different Cas9 proteins. The ngRNA can comprise multiple RNA molecules (e.g., a crRNA containing the ngRNA spacer and a tracrRNA) or can be a single gRNA molecule. The ngRNA is capable of directing a complexed Cas9 protein to bind the edit strand of the FANCC gene; thus, a complexed Cas9 nickase containing a nuclease inactivating mutation in the HNH domain will nick the non-edit strand. A PE3 ngRNA spacer has perfect complementarity to the edit strand both pre- and post-edit; a PE3b ngRNA spacer has perfect complementarity to the edit strand post-edit. PE3 ngRNA spacers are simply annotated as is in Tables 1-52. A PE3b spacer annotated with a * followed by a number code has perfect complementarity to the edit strand post-edit with a PEgRNA containing an RTT from the same Table and annotated with the same number code.

[0318] Any PEgRNA sequence and/or ngRNA sequence provided in Tables 1-52 may comprise, or further comprise, a 3′ motif at their 3′ end, for example, a series of 1, 2, 3, 4, 5, 6, 7 or more U nucleotides. In some embodiments, the ngRNA comprises 4 U nucleotides at its 3′ end. Without being bound by theory, such 3′ motifs are believed to increase ngRNA stability. The PEgRNA or ngRNA may be chemically synthesized and may alternatively or additionally comprise one or more chemical modifications, such as phosphorothioate (PS) bond(s), 2′-O-methylated (2′-Ome) nucleotides, or a combination thereof. In some embodiments, the PEgRNA and/or the ngRNA comprise 3′ mN*mN*mN*N and 5′mN*mN*mN* modifications, where m indicates that the nucleotide contains a 2′-O-Me modification and a * indicates the presence of a phosphorothioate bond. The PEgRNA sequence or ngRNA sequences may alternatively be adapted for expression from a DNA template, for example, by including a 5′ terminal G if the spacer of the PEgRNA or the ngRNA begins with another nucleotide, by including 6 or 7 U nucleotides at the 3′ end of the ngRNA, or both.

[0319] The gRNA core for the PEgRNA and/or the ngRNA can comprises a sequence selected from SEQ ID NOs: 3666-3670 or 3796-3800. In some embodiments, the gRNA core comprises SEQ ID NO: 3666.

[0320] Table 3 provides Prime Editing guide RNAs (PEgRNAs) that can be used with any Prime Editor containing a Cas9 protein capable of recognizing an AG or AGG PAM sequence. The PEgRNA of Table 3 can also be used in Prime Editing systems further comprising a nick guide RNA (ngRNA). Such PEgRNAs and Prime Editing systems can be used, for example, to correct a c.67del (322delG) mutation in the FANCC gene. The PEgRNAs exemplified in Table 3 and corresponding Prime Editing systems can also be used to correct any other mutations in the FANCC gene that are found in the portion of the FANCC gene that shares homology or complementarity with the editing template or the RTT.

[0321] The PEgRNAs exemplified in Table 3 comprise: (a) a spacer comprising at its 3′ end a sequence corresponding to sequence number 136; (b) a gRNA core capable of complexing with a Cas9 protein, and (c) an extension arm comprising (i) an editing template (or RTT) comprising at its 3′ end a sequence corresponding to sequence number 157 or 158, and (ii) a primer binding site (PBS) comprising at its 5′ end a sequence corresponding to sequence number 142.

[0322] The PEgRNA spacers can be, for example, 17 to 22 nucleotides in length, and can comprise the sequence corresponding to any one of sequence numbers 136-141. In some embodiments, the PEgRNA spacer comprises sequence number 139. In some embodiments, the PEgRNA spacer is 20 nucleotides in length and has the sequence of sequence number 139. The PEgRNA spacers in Table 3 are annotated with their corresponding PAM sequence(s), enabling the selection of an appropriate Cas9 protein. The PEgRNA is capable of directing a complexed Prime Editor to bind the non-edit strand of the FANCC gene; thus, a complexed Cas9 nickase portion of the Prime Editor will nick the edit strand. The PEgRNA protospacer may or may not be in close proximity to the position of the c.67 mutation to be corrected by the PEgRNA. The distance between the PEgRNA nick site and the position corresponding to the c.67 mutation (the nick-to-edit distance) is 1 nt for PEgRNAs exemplified in Table 3 that comprise a gRNA core capable of complexing with a SpCas9 nickase.

[0323] The editing template, or RTT, can encode a wild type FANCC sequence. For example, the editing template can comprise at its 3′ end the sequence corresponding to sequence number 157, 159, 160, 162, 163, 165, 166, 168, 169, 170, 171, 172, 173, 174, 175, 176, 177, 178, 179, 180, 181, 183, 184, 186, 187, 189, 190, 191, 192, 193, or 194. Alternatively, the editing template can encode a nucleotide edit that corrects the c.67del mutation, and further encode one or more synonymous mutations relative to the wildtype FANCC gene. In some embodiments, the editing template encodes one or more synonymous mutations that are PAM silencing mutations, e.g., a AGG-to-AAG or AG-to-AA PAM silencing mutation, and can comprise the sequence corresponding sequence number 158, 161, 164, 167, 182, 185, or 188. In some embodiments, the editing template is 10 to 40 nucleotides in length. In some embodiments, the editing template is 10 to 32 nucleotides in length. In some embodiments, the editing template is 12 to 16 nucleotides in length and encodes an edit that corrects the c.67del mutation and further encodes an AGG-to-AAG PAM silencing mutation. In some embodiments, the editing template is 10, 12, 14, 16, 30, or 32 nucleotides in length. In some embodiments, the editing template comprises at least 4 contiguous nucleotides of complementarity with the edit strand wherein the at least 4 nucleotides contiguous are located upstream of the 5′ most edit in the editing template.

[0324] The PBS can be, for example, 5 to 19 nucleotides in length and can comprise the sequence corresponding to any one of sequence numbers 142-156. In some embodiments, the PBS is 8 to 14 nucleotides in length. In some embodiments, the PBS is 14 nucleotides in length. In some embodiments, the PBS of the PEgRNA is a PBS sequence provided in sequence number 145, 146, 147, 148, 149, or 150.

[0325] The PEgRNA can comprise multiple RNA molecules or can be a single RNA molecule. In some embodiments, the PEgRNA comprises, from 5′ to 3′, the spacer, the gRNA core, the editing template, and the PBS. The 3′ end of the editing template can be contiguous with the 5′ end of the PBS. Exemplary PEgRNAs provided in Table 3 can comprise a sequence corresponding to any one of sequence numbers 219-322 and 3592-3603. Any PEgRNA exemplified in Table 3 can comprise, or further comprise, a 3′ motif at the 3′ end of the extension arm. In some embodiments, a 3′ motif is capable of forming a tertiary structure on its own, such as a hairpin. The 3′ motif can be connected to the 3′ end of the PBS via a linker sequence. The PEgRNA may also comprise adaptations at the 3′ end or 5′ end. For example, the PEgRNA may comprise a series of 1, 2, 3, 4, 5, 6, 7 or more additional Uracil nucleotides at the 3′ end. In some embodiments, the PEgRNA comprises 4 additional Uracil nucleotides at its 3′ end. Without being bound by theory, the 3 motifs or additional Uracil nucleotides can increase PEgRNA stability. PEgRNA sequences exemplified in Table 3 may be adapted for expression from a nucleic acid template with a U6 promoter, for example, by including a 5′ terminal G if the spacer of the PEgRNA begins with another nucleotide. The modifications and adaptations included in the selection of full length PEgRNAs included in Table 3 are annotated in the third column (“Description”) of Table 3.

[0326] The PEgRNAs exemplified in Table 3 may alternatively or additionally comprise one or more chemical modifications, such as phosphorothioate (PS) bond(s), 2′-O-methylated (2′-Ome) nucleotides, or a combination thereof. In some embodiments, the PEgRNA comprise 3′ mN*mN*mN*N and 5′mN*mN*mN* modifications, where m indicates that the nucleotide contains a 2′-O-Me modification and a * indicates the presence of a phosphorothioate bond.

[0327] Any of the PEgRNAs of Table 3 can be used in a Prime Editing system that further comprises a nick guide RNA (ngRNA). Such ngRNA can comprise a spacer comprising at its 3′ end a sequence corresponding to nucleotides 4-20 of any ngRNA spacer listed in Table 3 and a gRNA core capable of complexing with a Cas9 protein. For example, the sequence in the spacer of the ngRNA can comprise nucleotides 4-20, 3-20, 2-20, or 1-20 of any one of sequence numbers 4 and 195-218. In some embodiments, the spacer of the ngRNA is a ngRNA spacer listed in Table 3. The ngRNA spacers in Table 3 are annotated with their corresponding PAM sequences, enabling selection of an appropriate Cas9 protein. It can be advantageous to select a ngRNA spacer that has a PAM sequence compatible with the Cas9 protein used in the Prime Editor, thus avoiding the need to use two different Cas9 proteins. The ngRNA is capable of directing a complexed Cas9 protein to bind the edit strand of the FANCC gene; thus, a complexed Cas9 nickase containing a nuclease inactivating mutation in the HNH domain will nick the non-edit strand. The ngRNA protospacer may or may not be in close proximity to the PEgRNA protospacer. In some embodiments, the distance between the PEgRNA nick site and the ngRNA nick site (the nick-to-nick distance) is about 3 to 100 nt. In some embodiments, the distance between the PEgRNA nick site and the ngRNA nick site (the nick-to-nick distance) is about 21 to 96 nt. In some embodiments, the distance between the PEgRNA nick site and the ngRNA nick site (the nick-to-nick distance) is at least 22 nt. In some embodiments, the distance between the PEgRNA nick site and the ngRNA nick site (the nick-to-nick distance) is about 22 to 97 nt. In some embodiments, the distance between the PEgRNA nick site and the ngRNA nick site (the nick-to-nick distance) is about 77 to 97 nt. In some embodiments, the distance between the PEgRNA nick site and the ngRNA nick site (the nick-to-nick distance) is about 22, 34, 35, 46, 68, 77, or 97 nt. The ngRNA can be a PE3 ngRNA or a PE3b ngRNA: A PE3 ngRNA spacer has perfect complementarity to the edit strand both pre- and post-edit; a PE3b ngRNA spacer has perfect complementarity to the edit strand post-edit. Exemplary ngRNA provided in Table 3 can comprise a sequence corresponding to any one of sequence numbers 323-343 and 3604-3610.

[0328] Any ngRNA exemplified in Table 3 can comprise, or further comprise, a 3′ motif at the 3′ end. In some embodiments, a 3′ motif is capable of forming a tertiary structure on its own, such as a hairpin. The 3′ motif can be connected to the 3′ end of the ngRNA via a linker sequence. The ngRNA may also comprise adaptations at the 3′ end or 5′ end. For example, the ngRNA may comprise a series of 1, 2, 3, 4, 5, 6, 7 or more additional Uracil nucleotides at the 3′ end. In some embodiments, the ngRNA comprises 4 additional Uracil nucleotides at its 3′ end. Without being bound by theory, the 3 motifs or additional Uracil nucleotides can increase PEgRNA stability. ngRNA sequences exemplified in Table 3 may alternatively be adapted for expression from a nucleic acid template with a U6 promoter, for example, by including a 5′ terminal G if the spacer of the ngRNA begins with another nucleotide. The modifications and adaptations included in the selection of full length ngRNAs included in Table 3 are annotated in the third column (“Description”) of Table 3.

[0329] The ngRNAs exemplified in Table 3 may alternatively or additionally comprise one or more chemical modifications, such as phosphorothioate (PS) bond(s), 2′-O-methylated (2′-Ome) nucleotides, or a combination thereof. In some embodiments, the PEgRNA comprise 3′ mN*mN*mN*N and 5′mN*mN*mN* modifications, where m indicates that the nucleotide contains a 2′-O-Me modification and a * indicates the presence of a phosphorothioate bond.

[0330] Table 15 provides Prime Editing guide RNAs (PEgRNAs) that can be used with any Prime Editor containing a Cas9 protein capable of recognizing a TG or TGG PAM sequence. The PEgRNA of Table 15 can also be used in Prime Editing systems further comprising a nick guide RNA (ngRNA). Such PEgRNAs and Prime Editing systems can be used, for example, to correct a c.67del (322delG) mutation in the FANCC gene. The PEgRNAs exemplified in Table 15 and corresponding Prime Editing systems can also be used to correct any other mutations in the FANCC gene that are found in the portion of the FANCC gene that shares homology or complementarity with the editing template or the RTT.

[0331] The PEgRNAs exemplified in Table 15 comprise: (a) a spacer comprising at its 3′ end a sequence corresponding to sequence number 915; (b) a gRNA core capable of complexing with a Cas9 protein, and (c) an extension arm comprising (i) an editing template (or RTT) comprising at its 3′ end a sequence corresponding to sequence number 935, and (ii) a primer binding site (PBS) comprising at its 5′ end a sequence corresponding to sequence number 920.

[0332] The PEgRNA spacers can be, for example, 17 to 22 nucleotides in length, and can comprise the sequence corresponding to any one of sequence numbers 915-917, 35, 918, and 919. In some embodiments, the PEgRNA spacer comprises sequence number 35. In some embodiments, the PEgRNA spacer is 20 nucleotides in length and has the sequence of sequence number 35. The PEgRNA spacers in Table 15 are annotated with their corresponding PAM sequence(s), enabling the selection of an appropriate Cas9 protein. The PEgRNA is capable of directing a complexed Prime Editor to bind the non-edit strand of the FANCC gene; thus, a complexed Cas9 nickase portion of the Prime Editor will nick the edit strand. The PEgRNA protospacer may or may not be in close proximity to the position of the c.67 mutation to be corrected by the PEgRNA. The distance between the PEgRNA nick site and the position corresponding to the c.67 mutation (the nick-to-edit distance) is 7 nt for PEgRNAs exemplified in Table 15 that comprise a gRNA core capable of complexing with a SpCas9 nickase.

[0333] The editing template, or RTT, can encode a wild type FANCC sequence. For example, the editing template can comprise at its 3′ end the sequence corresponding to sequence number 935, 936, 937, 938, 939, 940, 941, 942, 943, 944, 384, 945, 946, 947, 948, 949, 950, 951, 952, 953, 954, 955, 956, 957, 958, 959, 960, 961, 962, 963, or 964. Alternatively, the editing template can encode a nucleotide edit that corrects the c.67del mutation, and further encode one or more synonymous mutations relative to the wildtype FANCC gene. In some embodiments, the editing template encodes one or more synonymous mutations that are PAM silencing mutations. In some embodiments, the editing template is 10 to 40 nucleotides in length. In some embodiments, the editing template is at least 11 nucleotides in length. In some embodiments, the editing template is 11 to 20 nucleotides in length. In some embodiments, the editing template comprises at least 4 contiguous nucleotides of complementarity with the edit strand wherein the at least 4 nucleotides contiguous are located upstream of the 5′ most edit in the editing template.

[0334] The PBS can be, for example, 5 to 19 nucleotides in length and can comprise the sequence corresponding to any one of sequence numbers 920-934. In some embodiments, the PBS is 8 to 14 nucleotides in length. In some embodiments, the PBS is 8 to 12 nucleotides in length. In some embodiments, the PBS is 8, 10, 12, or 14 nucleotides in length. In some embodiments, the PBS of the PEgRNA is a PBS sequence provided in sequence number 923, 925, 927, or 929.

[0335] The PEgRNA can comprise multiple RNA molecules or can be a single RNA molecule. In some embodiments, the PEgRNA comprises, from 5′ to 3′, the spacer, the gRNA core, the editing template, and the PBS. The 3′ end of the editing template can be contiguous with the 5′ end of the PBS. Exemplary PEgRNAs provided in Table 15 can comprise a sequence corresponding to any one of sequence numbers 965-1024 and 3611-3630. Any PEgRNA exemplified in Table 15 can comprise, or further comprise, a 3′ motif at the 3′ end of the extension arm. In some embodiments, a 3′ motif is capable of forming a tertiary structure on its own, such as a hairpin. The 3′ motif can be connected to the 3′ end of the PBS via a linker sequence. The PEgRNA may also comprise adaptations at the 3′ end or 5′ end. For example, the PEgRNA may comprise a series of 1, 2, 3, 4, 5, 6, 7 or more Uracil nucleotides at the 3′ end. In some embodiments, the PEgRNA comprises 4 additional Uracil nucleotides at its 3′ end. Without being bound by theory, the 3 motifs or additional Uracil nucleotides can increase PEgRNA stability. PEgRNA sequences exemplified in Table 15 may be adapted for expression from a nucleic acid template with a U6 promoter, for example, by including a 5′ terminal G if the spacer of the PEgRNA begins with another nucleotide. The modifications and adaptations included in the selection of full length PEgRNAs included in Table 15 are annotated in the third column (“Description”) of Table 15.

[0336] The PEgRNAs exemplified in Table 15 may alternatively or additionally comprise one or more chemical modifications, such as phosphorothioate (PS) bond(s), 2′-O-methylated (2′-Ome) nucleotides, or a combination thereof. In some embodiments, the PEgRNA comprise 3′ mN*mN*mN*N and 5′mN*mN*mN* modifications, where m indicates that the nucleotide contains a 2′-O-Me modification and a * indicates the presence of a phosphorothioate bond.

[0337] Any of the PEgRNAs of Table 15 can be used in a Prime Editing system that further comprises a nick guide RNA (ngRNA). Such ngRNA can comprise a spacer comprising at its 3′ end a sequence corresponding to nucleotides 4-20 of any ngRNA spacer listed in Table 15 and a gRNA core capable of complexing with a Cas9 protein. For example, the sequence in the spacer of the ngRNA can comprise nucleotides 4-20, 3-20, 2-20, or 1-20 of any one of sequence number 4,195,196, 197, 199, 200, 201, 202, 203, 204, 205, 206, 208, 209, 210, 211, 212, 213, 384, 214, 215, 216, 217, or 218. In some embodiments, the spacer of the ngRNA is a ngRNA spacer listed in Table 15. The ngRNA spacers in Table 15 are annotated with their corresponding PAM sequences, enabling selection of an appropriate Cas9 protein. It can be advantageous to select a ngRNA spacer that has a PAM sequence compatible with the Cas9 protein used in the Prime Editor, thus avoiding the need to use two different Cas9 proteins. The ngRNA is capable of directing a complexed Cas9 protein to bind the edit strand of the FANCC gene; thus, a complexed Cas9 nickase containing a nuclease inactivating mutation in the HNH domain will nick the non-edit strand. The ngRNA protospacer may or may not be in close proximity to the PEgRNA protospacer. In some embodiments, the distance between the PEgRNA nick site and the ngRNA nick site (the nick-to-nick distance) is about 3 to 100 nt. In some embodiments, the distance between the PEgRNA nick site and the ngRNA nick site (the nick-to-nick distance) is about 28 to 103 nt. In some embodiments, the distance between the PEgRNA nick site and the ngRNA nick site (the nick-to-nick distance) is at least 28 nt. In some embodiments, the distance between the PEgRNA nick site and the ngRNA nick site (the nick-to-nick distance) is about 83 to 103 nt. In some embodiments, the distance between the PEgRNA nick site and the ngRNA nick site (the nick-to-nick distance) is about 28, 40, 41, 52, 74, 83, or 103 nt. The ngRNA can be a PE3 ngRNA or a PE3b ngRNA: A PE3 ngRNA spacer has perfect complementarity to the edit strand both pre- and post-edit; a PE3b ngRNA spacer has perfect complementarity to the edit strand post-edit. Exemplary ngRNA provided in Table 15 can comprise a sequence corresponding to any one of sequence numbers 323-343 and 3604-3610.

[0338] Any ngRNA exemplified in Table 15 can comprise, or further comprise, a 3′ motif at the 3′ end. In some embodiments, a 3′ motif is capable of forming a tertiary structure on its own, such as a hairpin. The 3′ motif can be connected to the 3′ end of the ngRNA via a linker sequence. The ngRNA may also comprise adaptations at the 3′ end or 5′ end. For example, the ngRNA may comprise a series of 1, 2, 3, 4, 5, 6, 7 or more additional Uracil nucleotides at the 3′ end. In some embodiments, the ngRNA comprises 4 additional Uracil nucleotides at its 3′ end. Without being bound by theory, the 3 motifs or additional Uracil nucleotides can increase PEgRNA stability. ngRNA sequences exemplified in Table 15 may be adapted for expression from a nucleic acid template with a U6 promoter, for example, by including a 5′ terminal G if the spacer of the ngRNA begins with another nucleotide. The modifications and adaptations included in the selection of full length ngRNAs included in Table 15 are annotated in the third column (“Description”) of Table 15.

[0339] The ngRNA exemplified in Table 15 may alternatively or additionally comprise one or more chemical modifications, such as phosphorothioate (PS) bond(s), 2′-O-methylated (2′-Ome) nucleotides, or a combination thereof. In some embodiments, the PEgRNA comprise 3′ mN*mN*mN*N and 5′mN*mN*mN* modifications, where m indicates that the nucleotide contains a 2′-O-Me modification and a * indicates the presence of a phosphorothioate bond.

[0340] Table 18 provides Prime Editing guide RNAs (PEgRNAs) that can be used with any Prime Editor containing a Cas9 protein capable of recognizing a TG or TGG PAM sequence. The PEgRNA of Table 18 can also be used in Prime Editing systems further comprising a nick guide RNA (ngRNA). Such PEgRNAs and Prime Editing systems can be used, for example, to correct a c.67del (322delG) mutation in the FANCC gene. The PEgRNAs exemplified in Table 18 and corresponding Prime Editing systems can also be used to correct any other mutations in the FANCC gene that are found in the portion of the FANCC gene that shares homology or complementarity with the editing template or the RTT.

[0341] The PEgRNAs exemplified in Table 18 comprise: (a) a spacer comprising at its 3′ end a sequence corresponding to sequence number 1230; (b) a gRNA core capable of complexing with a Cas9 protein, and (c) an extension arm comprising (i) an editing template (or RTT) comprising at its 3′ end a sequence corresponding to sequence number 1250, 1251, 1252, or 1253, and (ii) a primer binding site (PBS) comprising at its 5′ end a sequence corresponding to sequence number 1235.

[0342] The PEgRNA spacers can be, for example, 17 to 22 nucleotides in length, and can comprise the sequence corresponding to any one of sequence numbers 1230-1232, 212, 1233, and 1234. In some embodiments, the PEgRNA spacer comprises sequence number 212. In some embodiments, the PEgRNA spacer is 20 nucleotides in length and has the sequence of sequence number 212. The PEgRNA spacers in Table 18 are annotated with their corresponding PAM sequence(s), enabling the selection of an appropriate Cas9 protein. The PEgRNA is capable of directing a complexed Prime Editor to bind the non-edit strand of the FANCC gene; thus, a complexed Cas9 nickase portion of the Prime Editor will nick the edit strand. The PEgRNA protospacer may or may not be in close proximity to the position of the c.67 mutation to be corrected by the PEgRNA. The distance between the PEgRNA nick site and the position corresponding to the c.67 mutation (the nick-to-edit distance) is 16 nt for PEgRNAs exemplified in Table 18 that comprise a gRNA core capable of complexing with a SpCas9 nickase.

[0343] The editing template, or RTT, can encode a wild type FANCC sequence. For example, the editing template can comprise at its 3′ end the sequence corresponding to sequence number 1253, 1259, 1265, 1271, 28, 1282, 1288, 1294, 1300, 1306, 1312, 1318, 1324, 1330, 1336, 1342, 1348, 1354, 1360, 1366, 1372, 1378, 1384, 1390, or 1396. Alternatively, the editing template can encode a nucleotide edit that corrects the c.67del mutation, and further encode one or more synonymous mutations relative to the wildtype FANCC gene. In some embodiments, the editing template encodes one or more synonymous mutations that are PAM silencing mutations. For example, in some embodiments, the editing template encodes one or more synonymous mutations that are PAM silencing mutations and can comprise at its 3′ end the sequence corresponding to sequence number 1254, 1255, 1256, 1257, 1258, 1260, 1261, 1262, 1263, 1264, 1266, 1267, 1268, 1269, 1270, 1272, 1273, 1274, 1275, 1276, 1277, 1278, 1279, 1280, 1281, 1283, 1284, 1285, 1286, 1287, 1289, 1290, 1291, 1292, 1293, 1295, 1296, 1297, 1298, 1299, 1301, 1302, 1303, 1304, 1305, 1307, 1308, 1309, 1310, 1311, 1313, 1314, 1315, 1316, 1317, 1319, 1320, 1321, 1322, 1323, 1325, 1326, 1327, 1328, 1329, 1331, 1332, 1333, 1334, 1335, 1337, 1338, 1339, 1340, 1341, 1343, 1344, 1345, 1346, 1347, 1349, 1350, 1351, 1352, 1353, 1355, 1356, 1357, 1358, 1359, 1361, 1362, 1363, 1364, 1365, 1367, 1368, 1369, 1370, 1371, 1373, 1374, 1375, 1376, 1377, 1379, 1380, 1381, 1382, 1383, 1385, 1386, 1387, 1388, 1389, 1391, 1392, 1393, 1394, 1395, 1397, or 1398. The PAM silencing mutations encoded by exemplary RTTs are annotated in Table 18, third column (“Description”). In some embodiments, the editing template is 10 to 40 nucleotides in length. In some embodiments, the editing template is 20 to 29 nucleotides in length. In some embodiments, the editing template is at least 25 nucleotides in length. In some embodiments, the editing template is 25 nucleotides in length.

[0344] The PBS can be, for example, 5 to 19 nucleotides in length and can comprise the sequence corresponding to any one of sequence numbers 1235-1249. In some embodiments, the PBS is 8 to 14 nucleotides in length. In some embodiments, the PBS is 8, 10, 12, or 14 nucleotides in length. In some embodiments, the PBS of the PEgRNA is a PBS sequence provided in sequence number 1238, 1240, 1242, or 1244. In some embodiments, the editing template comprises at least 4 contiguous nucleotides of complementarity with the edit strand wherein the at least 4 nucleotides contiguous are located upstream of the 5′ most edit in the editing template.

[0345] The PEgRNA can comprise multiple RNA molecules or can be a single RNA molecule. In some embodiments, the PEgRNA comprises, from 5′ to 3′, the spacer, the gRNA core, the editing template, and the PBS. The 3′ end of the editing template can be contiguous with the 5′ end of the PBS. Exemplary PEgRNAs provided in Table 18 can comprise a sequence corresponding to any one of sequence numbers 1403-1462 and 3631-3650. Any PEgRNA exemplified in Table 18 can comprise, or further comprise, a 3′ motif at the 3′ end of the extension arm. In some embodiments, a 3′ motif is capable of forming a tertiary structure on its own, such as a hairpin. The 3′ motif can be connected to the 3′ end of the PBS via a linker sequence. The PEgRNA may also comprise adaptations at the 3′ end or 5′ end. For example, the PEgRNA may comprise a series of 1, 2, 3, 4, 5, 6, 7 or more additional Uracil nucleotides at the 3′ end. In some embodiments, the PEgRNA comprises 4 additional Uracil nucleotides at its 3′ end. Without being bound by theory, the 3 motifs or additional Uracil nucleotides can increase PEgRNA stability. PEgRNA sequences exemplified in Table 18 may be adapted for expression from a nucleic acid template with a U6 promoter, for example, by including a 5′ terminal G if the spacer of the PEgRNA begins with another nucleotide. The modifications and adaptations included in the selection of full length PEgRNAs included in Table 18 are annotated in the third column (“Description”) of Table 18.

[0346] The PEgRNA exemplified in Table 18 may alternatively or additionally comprise one or more chemical modifications, such as phosphorothioate (PS) bond(s), 2′-O-methylated (2′-Ome) nucleotides, or a combination thereof. In some embodiments, the PEgRNA comprise 3′ mN*mN*mN*N and 5′mN*mN*mN* modifications, where m indicates that the nucleotide contains a 2′-O-Me modification and a * indicates the presence of a phosphorothioate bond. Any of the PEgRNAs of Table 18 can be used in a Prime Editing system that further comprises a nick guide RNA (ngRNA). Such ngRNA can comprise a spacer comprising at its 3′ end a sequence corresponding to nucleotides 4-20 of any ngRNA spacer listed in Table 18 and a gRNA core capable of complexing with a Cas9 protein. For example, the sequence in the spacer of the ngRNA can comprise nucleotides 4-20, 3-20, 2-20, or 1-20 of any one of sequence number 24, 25, 26, 27, 1274, 1275, 1276, 28, 1277, 1278, 1108, 29, 1110, 30, 31, 32, 33, 1111, 34, 35, 37, 38, 39, 41, 1113, 1399, 1400, 43, 1401, 1402, 44, 1114, 45, 46, 47, or 48. In some embodiments, the spacer of the ngRNA is a ngRNA spacer listed in Table 18. The ngRNA spacers in Table 18 are annotated with their corresponding PAM sequences, enabling selection of an appropriate Cas9 protein. It can be advantageous to select a ngRNA spacer that has a PAM sequence compatible with the Cas9 protein used in the Prime Editor, thus avoiding the need to use two different Cas9 proteins. The ngRNA is capable of directing a complexed Cas9 protein to bind the edit strand of the FANCC gene; thus, a complexed Cas9 nickase containing a nuclease inactivating mutation in the HNH domain will nick the non-edit strand. The ngRNA protospacer may or may not be in close proximity to the PEgRNA protospacer. In some embodiments, the distance between the PEgRNA nick site and the ngRNA nick site (the nick-to-nick distance) is about 3 to 100 nt. In some embodiments, the distance between the PEgRNA nick site and the ngRNA nick site (the nick-to-nick distance) is about 19 to 58 nt. In some embodiments, the distance between the PEgRNA nick site and the ngRNA nick site (the nick-to-nick distance) is about 19, 31, 37, or 58 nt. The ngRNA can be a PE3 ngRNA or a PE3b ngRNA: A PE3 ngRNA spacer has perfect complementarity to the edit strand both pre- and post-edit; a PE3b ngRNA spacer has perfect complementarity to the edit strand post-edit. A PE3 or PE3b ngRNA spacer in Table 18 annotated with a “*” and the same number code as an RTT in Table 18 has perfect complementarity to the edit strand post-edit by a PEgRNA containing the RTT. Exemplary ngRNA provided in Table 18 can comprise a sequence corresponding to any one of sequence numbers 49-60.

[0347] Any ngRNA exemplified in Table 18 can comprise, or further comprise, a 3′ motif at the 3′ end. In some embodiments, a 3′ motif is capable of forming a tertiary structure on its own, such as a hairpin. The 3′ motif can be connected to the 3′ end of the ngRNA via a linker sequence. The PEgRNA may also comprise adaptations at the 3′ end or 5′ end. For example, the PEgRNA may comprise a series of 1, 2, 3, 4, 5, 6, 7 or more additional Uracil nucleotides at the 3′ end. In some embodiments, the ngRNA comprises 4 additional Uracil nucleotides at its 3′ end. Without being bound by theory, the 3 motifs or additional Uracil nucleotides can increase PEgRNA stability. ngRNA sequences exemplified in Table 18 may be adapted for expression from a nucleic acid template with a U6 promoter, for example, by including a 5′ terminal G if the spacer of the ngRNA begins with another nucleotide. The modifications and adaptations included in the selection of full length ngRNAs included in Table 18 are annotated in the third column (“Description”) of Table 18.

[0348] The ngRNA exemplified in Table 18 may alternatively or additionally comprise one or more chemical modifications, such as phosphorothioate (PS) bond(s), 2′-O-methylated (2′-Ome) nucleotides, or a combination thereof. In some embodiments, the PEgRNA comprise 3′ mN*mN*mN*N and 5′mN*mN*mN* modifications, where m indicates that the nucleotide contains a 2′-O-Me modification and a * indicates the presence of a phosphorothioate bond.

[0349] Table 19 provides Prime Editing guide RNAs (PEgRNAs) that can be used with any Prime Editor containing a Cas9 protein capable of recognizing a GG or GGG PAM sequence. The PEgRNA of Table 19 can also be used in Prime Editing systems further comprising a nick guide RNA (ngRNA). Such PEgRNAs and Prime Editing systems can be used, for example, to correct a c.67del (322delG) mutation in the FANCC gene. The PEgRNAs exemplified in Table 19 and corresponding Prime Editing systems can also be used to correct any other mutations in the FANCC gene that are found in the portion of the FANCC gene that shares homology or complementarity with the editing template or the RTT.

[0350] The PEgRNAs exemplified in Table 19 comprise: (a) a spacer comprising at its 3′ end a sequence corresponding to sequence number 1463; (b) a gRNA core capable of complexing with a Cas9 protein, and (c) an extension arm comprising (i) an editing template (or RTT) comprising at its 3′ end a sequence corresponding to sequence number 1483, 1484, 1485, or 1486, and (ii) a primer binding site (PBS) comprising at its 5′ end a sequence corresponding to sequence number 1468.

[0351] The PEgRNA spacers can be, for example, 17 to 22 nucleotides in length, and can comprise the sequence corresponding to any one of sequence numbers 1463-1465, 213, 1466, and 1467. In some embodiments, the PEgRNA spacer comprises sequence number 212. In some embodiments, the PEgRNA spacer is 20 nucleotides in length and has the sequence of sequence number 213. The PEgRNA spacers in Table 19 are annotated with their corresponding PAM sequence(s), enabling the selection of an appropriate Cas9 protein. The PEgRNA is capable of directing a complexed Prime Editor to bind the non-edit strand of the FANCC gene; thus, a complexed Cas9 nickase portion of the Prime Editor will nick the edit strand. The PEgRNA protospacer may or may not be in close proximity to the position of the c.67 mutation to be corrected by the PEgRNA. The distance between the PEgRNA nick site and the position corresponding to the c.67 mutation (the nick-to-edit distance) is 28 nt for PEgRNAs exemplified in Table 19 that comprise a gRNA core capable of complexing with a SpCas9 nickase.

[0352] The editing template, or RTT, can encode a wild type FANCC sequence. For example, the editing template can comprise at its 3′ end the sequence corresponding to sequence number 1484, 1488, 1492, 1496, 1500, 1504, 1508, 1512, 1516, 1520, 1524, 1528, or 1532. Alternatively, the editing template can encode a nucleotide edit that corrects the c.67del mutation, and further encode one or more synonymous mutations relative to the wildtype FANCC gene. In some embodiments, the editing template encodes one or more synonymous mutations that are PAM silencing mutations. For example, in some embodiments, the editing template encodes one or more synonymous mutations that are PAM silencing mutations and can comprise at its 3′ end the sequence corresponding to sequence number 1483, 1485, 1486, 1487, 1489, 1490, 1491, 1493, 1494, 1495, 1497, 1498, 1499, 1501, 1502, 1503, 1505, 1506, 1507, 1509, 1510, 1511, 1513, 1514, 1515, 1517, 1518, 1519, 1521, 1522, 1523, 1525, 1526, 1527, 1529, 1530, 1531, 1533, or 1534. The PAM silencing mutations encoded by exemplary RTTs are annotated in Table 19, third column (“Description”). In some embodiments, the editing template is 10 to 40 nucleotides in length. In some embodiments, the editing template is 32 to 39 nucleotides in length. In some embodiments, the editing template is 39 nucleotides in length. In some embodiments, the editing template comprises at least 4 contiguous nucleotides of complementarity with the edit strand wherein the at least 4 nucleotides contiguous are located upstream of the 5′ most edit in the editing template.

[0353] The PBS can be, for example, 5 to 19 nucleotides in length and can comprise the sequence corresponding to any one of sequence numbers 1468-1482. In some embodiments, the PBS is 8 to 14 nucleotides in length. In some embodiments, the PBS is 8, 10, 12, or 14 nucleotides in length. In some embodiments, the PBS of the PEgRNA is a PBS sequence provided in sequence number 1471, 1473, 1475, or 1477.

[0354] The PEgRNA can comprise multiple RNA molecules or can be a single RNA molecule. In some embodiments, the PEgRNA comprises, from 5′ to 3′, the spacer, the gRNA core, the editing template, and the PBS. The 3′ end of the editing template can be contiguous with the 5′ end of the PBS. Exemplary PEgRNAs provided in Table 19 can comprise a sequence corresponding to any one of sequence numbers 1541-1588 and 3651-3665. Any PEgRNA exemplified in Table 19 can comprise, or further comprise, a 3′ motif at the 3′ end of the extension arm. In some embodiments, a 3′ motif is capable of forming a tertiary structure on its own, such as a hairpin. The 3′ motif can be connected to the 3′ end of the PBS via a linker sequence. The PEgRNA may also comprise adaptations at the 3′ end or 5′ end. For example, the PEgRNA may comprise a series of 1, 2, 3, 4, 5, 6, 7 or more additional Uracil nucleotides at the 3′ end. In some embodiments, the PEgRNA comprises 4 additional Uracil nucleotides at its 3′ end. Without being bound by theory, the 3 motifs or additional Uracil nucleotides can increase PEgRNA stability. PEgRNA sequences exemplified in Table 19 may be adapted for expression from a nucleic acid template with a U6 promoter, for example, by including a 5′ terminal G if the spacer of the PEgRNA begins with another nucleotide. The modifications and adaptations included in the selection of full length PEgRNAs included in Table 19 are annotated in the third column (“Description”) of Table 19.

[0355] The PEgRNAs exemplified in Table 19 may alternatively or additionally comprise one or more chemical modifications, such as phosphorothioate (PS) bond(s), 2′-O-methylated (2′-Ome) nucleotides, or a combination thereof. In some embodiments, the PEgRNA comprise 3′ mN*mN*mN*N and 5′mN*mN*mN* modifications, where m indicates that the nucleotide contains a 2′-O-Me modification and a * indicates the presence of a phosphorothioate bond.

[0356] Any of the PEgRNAs of Table 19 can be used in a Prime Editing system that further comprises a nick guide RNA (ngRNA). Such ngRNA can comprise a spacer comprising at its 3′ end a sequence corresponding to nucleotides 4-20 of any ngRNA spacer listed in Table 19 and a gRNA core capable of complexing with a Cas9 protein. For example, the sequence in the spacer of the ngRNA can comprise nucleotides 4-20, 3-20, 2-20, or 1-20 of any one of sequence number 24, 25, 26, 27, 28, 29, 30, 31, 32, 33, 34, 35, 1535, 36, 1536, 1537, 37, 38, 39, 1538, 40, 1539, 1540, 41, 43, 44, 45, 46, 47, or 48. In some embodiments, the spacer of the ngRNA is a ngRNA spacer listed in Table 19. The ngRNA spacers in Table 19 are annotated with their corresponding PAM sequences, enabling selection of an appropriate Cas9 protein. It can be advantageous to select a ngRNA spacer that has a PAM sequence compatible with the Cas9 protein used in the Prime Editor, thus avoiding the need to use two different Cas9 proteins. The ngRNA is capable of directing a complexed Cas9 protein to bind the edit strand of the FANCC gene; thus, a complexed Cas9 nickase containing a nuclease inactivating mutation in the HNH domain will nick the non-edit strand. The ngRNA protospacer may or may not be in close proximity to the PEgRNA protospacer. In some embodiments, the distance between the PEgRNA nick site and the ngRNA nick site (the nick-to-nick distance) is about 3 to 100 nt. In some embodiments, the distance between the PEgRNA nick site and the ngRNA nick site (the nick-to-nick distance) is about 31 to 70 nt. In some embodiments, the distance between the PEgRNA nick site and the ngRNA nick site (the nick-to-nick distance) is about 31, 43, 49, or 70 nt. The ngRNA can be a PE3 ngRNA or a PE3b ngRNA: A PE3 ngRNA spacer has perfect complementarity to the edit strand both pre- and post-edit; a PE3b ngRNA spacer has perfect complementarity to the edit strand post-edit. A PE3 or PE3b ngRNA spacer in Table 19 annotated with a “*” and the same number code as an RTT in Table 19 has perfect complementarity to the edit strand post-edit by a PEgRNA containing the RTT. Exemplary ngRNA provided in Table 19 can comprise a sequence corresponding to any one of sequence numbers 49-60.

[0357] Any ngRNA exemplified in Table 19 can comprise, or further comprise, a 3′ motif at the 3′ end of the extension arm. In some embodiments, a 3′ motif is capable of forming a tertiary structure on its own, such as a hairpin. The 3′ motif can be connected to the 3′ end of the ngRNA via a linker sequence. The ngRNA may also comprise adaptations at the 3′ end or 5′ end. For example, the ngRNA may comprise a series of 1, 2, 3, 4, 5, 6, 7 or more additional Uracil nucleotides at the 3′ end. In some embodiments, the ngRNA comprises 4 additional Uracil nucleotides at its 3′ end. Without being bound by theory, the 3 motifs or additional Uracil nucleotides can increase PEgRNA stability. ngRNA sequences exemplified in Table 19 may be adapted for expression from a nucleic acid template with a U6 promoter, for example, by including a 5′ terminal G if the spacer of the ngRNA begins with another nucleotide. The modifications and adaptations included in the selection of full length ngRNAs included in Table 19 are annotated in the third column (“Description”) of Table 19.

[0358] The ngRNAs exemplified in Table 19 may alternatively or additionally comprise one or more chemical modifications, such as phosphorothioate (PS) bond(s), 2′-O-methylated (2′-Ome) nucleotides, or a combination thereof. In some embodiments, the PEgRNA comprise 3′ mN*mN*mN*N and 5′mN*mN*mN* modifications, where m indicates that the nucleotide contains a 2′-O-Me modification and a * indicates the presence of a phosphorothioate bond.

[0359] Additional exemplary PEgRNAs and ngRNAs for correction of the c.67del mutation are provided in Tables 1, 2, 4-14, 16, 17, and 20-34. Tables 1, 2, 4-14, 16, 17, and 20-34 each contain three columns: the first column is the sequence number, the second column is the actual sequence, and the third column contains a description of the sequence.

[0360] The PEgRNAs exemplified in Tables 1, 2, 4-14, 16, 17, and 20-34 comprise: (a) a spacer comprising at its 3′ end a sequence corresponding to a listed PEgRNA spacer sequence; (b) a gRNA core capable of complexing with a Cas9 protein, and (c) an extension arm comprising: (i) an editing template comprising at its 3′ end an RTT sequence from the same table as the PEgRNA spacer, and (ii) a prime binding site (PBS) comprising at its 5′ end a PBS sequence from the same table as the PEgRNA spacer.

[0361] The PEgRNA spacer can be, for example, 16-22 nucleotides in length. The PEgRNA spacers in Tables 1, 2, 4-14, 16, 17, and 20-34 are annotated with their PAM sequence(s), enabling the selection of an appropriate Cas9 protein.

[0362] The editing template, or RTT, can encode a wild type FANCC sequence. Alternatively, the editing template can encode a nucleotide edit that corrects the c.67del mutation, and further encode one or more synonymous mutations relative to the wildtype FANCC gene. In some embodiments, the editing template encodes one or more synonymous mutations that are PAM silencing mutations. The PAM silencing mutations encoded by exemplary RTTs are annotated in each of Tables 1, 2, 4-14, 16, 17, and 20-34, third column (“Description”). In some embodiments, the editing template is 10 to 40 nucleotides in length. In some embodiments, the editing template comprises at least 4 contiguous nucleotides of complementarity with the edit strand wherein the at least 4 nucleotides contiguous are located upstream of the 5′ most edit in the editing template.

[0363] The PBS can be, for example, 5 to 19 nucleotides in length. In some cases, a PBS length of no more than 3 nucleotides less than the PEgRNA spacer length is chosen. In some embodiments, a PBS length between 8 to 14 nucleotides is chosen.

[0364] The PEgRNA can comprise multiple RNA molecules or can be a single RNA molecule. In some embodiments, the PEgRNA comprises, from 5′ to 3′, the spacer, the gRNA core, the editing template, and the PBS. The 3′ end of the editing template can be contiguous with the 5′ end of the PBS. Exemplary PEgRNAs provided in Tables 1, 2, 4-14, 16, 17, and 20-34 can comprise a sequence corresponding to any one of full length PEgRNA sequences in each table. Any PEgRNA exemplified in Tables 1, 2, 4-14, 16, 17, and 20-34 can comprise, or further comprise, a 3′ motif at the 3′ end of the extension arm. In some embodiments, a 3′ motif is capable of forming a tertiary structure on its own, such as a hairpin. The 3′ motif can be connected to the 3′ end of the PBS via a linker sequence. The PEgRNA may also comprise adaptations at the 3′ end or 5′ end. For example, the PEgRNA may comprise a series of 1, 2, 3, 4, 5, 6, 7 or more additional Uracil nucleotides at the 3′ end. In some embodiments, the PEgRNA comprises 4 additional Uracil nucleotides at its 3′ end. Without being bound by theory, the 3 motifs or additional Uracil nucleotides can increase PEgRNA stability. PEgRNA sequences exemplified in Tables 1, 2, 4-14, 16, 17, and 20-34 may be adapted for expression from a nucleic acid template with a U6 promoter, for example, by including a 5′ terminal G if the spacer of the PEgRNA begins with another nucleotide. The modifications and end adaptations included in the selection of full length PEgRNAs included in Tables 1, 2, 4-14, 16, 17, and 20-34 are annotated in the third column (“Description”) of the Tables.

[0365] The PEgRNAs exemplified in Tables 1, 2, 4-14, 16, 17, and 20-34 may alternatively or additionally comprise one or more chemical modifications, such as phosphorothioate (PS) bond(s), 2′-O-methylated (2′-Ome) nucleotides, or a combination thereof. In some embodiments, the PEgRNA comprise 3′ mN*mN*mN*N and 5′mN*mN*mN* modifications, where m indicates that the nucleotide contains a 2′-O-Me modification and a * indicates the presence of a phosphorothioate bond.

[0366] Any of the PEgRNAs of Tables 1, 2, 4-14, 16, 17, and 20-34 can be used in a Prime Editing system that further comprises a nick guide RNA (ngRNA). Such ngRNA can comprise a spacer comprising at its 3′ end a sequence corresponding to nucleotides 4-20 of any ngRNA spacer listed in the same Table as the PEgRNA and a gRNA core capable of complexing with a Cas9 protein. In some embodiments, the spacer of the ngRNA is a ngRNA spacer listed in the same Table as the PEgRNA. The ngRNA spacers in each of Tables 1, 2, 4-14, 16, 17, and 20-34 are annotated with their corresponding PAM sequences, enabling selection of an appropriate Cas9 protein. It can be advantageous to select a ngRNA spacer that has a PAM sequence compatible with the Cas9 protein used in the Prime Editor, thus avoiding the need to use two different Cas9 proteins. The ngRNA is capable of directing a complexed Cas9 protein to bind the edit strand of the FANCC gene; thus, a complexed Cas9 nickase containing a nuclease inactivating mutation in the HNH domain will nick the non-edit strand. The ngRNA protospacer may or may not be in close proximity to the PEgRNA protospacer. In some embodiments, the distance between the PEgRNA nick site and the ngRNA nick site (the nick-to-nick distance) is about 3 to 100 nt. The ngRNA can be a PE3 ngRNA or a PE3b ngRNA: A PE3 ngRNA spacer has perfect complementarity to the edit strand both pre- and post-edit; a PE3b ngRNA spacer has perfect complementarity to the edit strand post-edit. A PE3 or PE3b ngRNA spacer in Tables 1, 2, 4-14, 16, 17, and 20-34 annotated with a “*” and the same number code as an RTT in the same Table has perfect complementarity to the edit strand post-edit by a PEgRNA containing the RTT. Exemplary ngRNA provided in Tables 1, 2, 4-14, 16, 17, and 20-34 can comprise a sequence corresponding to any one of the full length ngRNAs provided in the Tables.

[0367] Any ngRNA exemplified in Tables 1, 2, 4-14, 16, 17, and 20-34 can comprise, or further comprise, a 3′ motif at the 3′ end of the extension arm. In some embodiments, a 3′ motif is capable of forming a tertiary structure on its own, such as a hairpin. The 3′ motif can be connected to the 3′ end of the ngRNA via a linker sequence. The ngRNA may also comprise adaptations at the 3′ end or 5′ end. For example, the ngRNA may comprise a series of 1, 2, 3, 4, 5, 6, 7 or more additional Uracil nucleotides at the 3′ end. In some embodiments, the ngRNA comprises 4 additional Uracil nucleotides at its 3′ end. Without being bound by theory, the 3 motifs or additional Uracil nucleotides can increase PEgRNA stability. ngRNA sequences exemplified in Tables 1, 2, 4-14, 16, 17, and 20-34 may be adapted for expression from a nucleic acid template with a U6 promoter, for example, by including a 5′ terminal G if the spacer of the ngRNA begins with another nucleotide. The modifications and end adaptations included in the selection of full length ngRNAs included in Tables 1, 2, 4-14, 16, 17, and 20-34 are annotated in the third column (“Description”) of the Tables.

[0368] The ngRNA exemplified in Tables 1, 2, 4-14, 16, 17, and 20-34 may alternatively or additionally comprise one or more chemical modifications, such as phosphorothioate (PS) bond(s), 2′-O-methylated (2′-Ome) nucleotides, or a combination thereof. In some embodiments, the PEgRNA comprise 3′ mN*mN*mN*N and 5′mN*mN*mN* modifications, where m indicates that the nucleotide contains a 2′-0-Me modification and a * indicates the presence of a phosphorothioate bond.

[0369] Table 45 provides Prime Editing guide RNAs (PEgRNAs) that can be used with any Prime Editor containing a Cas9 protein capable of recognizing a TG or TGG PAM sequence. The PEgRNA of Table 45 can also be used in Prime Editing systems further comprising a nick guide RNA (ngRNA). Such PEgRNAs and Prime Editing systems can be used, for example, to correct a c.456+4A->T (IVS4+4 A->T) mutation in the FANCC gene. The PEgRNAs exemplified in Table 45 and corresponding Prime Editing systems can also be used to correct any other mutations in the FANCC gene that are found in the portion of the FANCC gene that shares homology or complementarity with the editing template or the RTT.

[0370] The PEgRNAs exemplified in Table 45 comprise: (a) a spacer comprising at its 3′ end a sequence corresponding to sequence number 3086; (b) a gRNA core capable of complexing with a Cas9 protein, and (c) an extension arm comprising (i) an editing template (or RTT) comprising at its 3′ end a sequence corresponding to sequence number 3106, and (ii) a primer binding site (PBS) comprising at its 5′ end a sequence corresponding to sequence number 3091.

[0371] The PEgRNA spacers can be, for example, 17 to 22 nucleotides in length, and can comprise the sequence corresponding to any one of sequence numbers 3086-3088, 2619, 3089, and 3090. In some embodiments, the PEgRNA spacer comprises sequence number 2619. In some embodiments, the PEgRNA spacer is 20 nucleotides in length and has the sequence of sequence number 2619. The PEgRNA spacers in Table 45 are annotated with their corresponding PAM sequence(s), enabling the selection of an appropriate Cas9 protein. The PEgRNA is capable of directing a complexed Prime Editor to bind the non-edit strand of the FANCC gene; thus, a complexed Cas9 nickase portion of the Prime Editor will nick the edit strand. The PEgRNA protospacer may or may not be in close proximity to the position of the c.456+4 A->T mutation to be corrected by the PEgRNA. The distance between the PEgRNA nick site and the position corresponding to the c.456+4 A->T mutation (the nick-to-edit distance) is 23 nt for PEgRNAs exemplified in Table 45 that comprise a gRNA core capable of complexing with a SpCas9 nickase.

[0372] The editing template, or RTT, can encode a wild type FANCC sequence. For example, the editing template can comprise at its 3′ end the sequence corresponding to any one of sequence numbers 3106-3123. Alternatively, the editing template can encode a nucleotide edit that corrects the c.456+4 A->T mutation, and further encode one or more synonymous mutations relative to the wildtype FANCC gene. In some embodiments, the editing template is 10 to 40 nucleotides in length. In some embodiments, the editing template is 27 to 33 nucleotides in length. In some embodiments, the editing template comprises at least 4 contiguous nucleotides of complementarity with the edit strand wherein the at least 4 nucleotides contiguous are located upstream of the 5′ most edit in the editing template.

[0373] The PBS can be, for example, 5 to 19 nucleotides in length and can comprise the sequence corresponding to any one of sequence numbers 3091-3105. In some embodiments, the PBS is 8 to 14 nucleotides in length. In some embodiments, the PBS of the PEgRNA is a PBS sequence provided in sequence number 3094, 3096, 3098, or 3100.

[0374] The PEgRNA can comprise multiple RNA molecules or can be a single RNA molecule. In some embodiments, the PEgRNA comprises, from 5′ to 3′, the spacer, the gRNA core, the editing template, and the PBS. The 3′ end of the editing template can be contiguous with the 5′ end of the PBS. Exemplary PEgRNAs provided in Table 45 can comprise a sequence corresponding to sequence number 3124, 3125, 3126, 3127, 3128, 3129, 3130, 3131, 3132, 3133, 3134, 3135, 3136, 3137, 3138, 3139, 3140, 3141, 3142, 3143, 3144, 3145, 3146, 3147, 3148, 3149, 3150, 3151, 3152, 3153, 3154, or 3155.

[0375] Any PEgRNA exemplified in Table 45 can comprise, or further comprise, a 3′ motif at the 3′ end of the extension arm. In some embodiments, a 3′ motif is capable of forming a tertiary structure on its own, such as a hairpin. The 3′ motif can be connected to the 3′ end of the PBS via a linker sequence. The PEgRNA may also comprise adaptations at the 3′ end or 5′ end. For example, the PEgRNA may comprise a series of 1, 2, 3, 4, 5, 6, 7 or more additional Uracil nucleotides at the 3′ end. In some embodiments, the PEgRNA comprises 4 additional Uracil nucleotides at its 3′ end. Without being bound by theory, the 3 motifs or additional Uracil nucleotides can increase PEgRNA stability. PEgRNA sequences exemplified in Table 45 may alternatively be adapted for expression from a nucleic acid template with a U6 promoter, for example, by including a 5′ terminal G if the spacer of the PEgRNA begins with another nucleotide. The end adaptations included in the selection of full length PEgRNAs included in Table 45 are annotated in the third column (“Description”) of Table 45.

[0376] The PEgRNA may alternatively or additionally comprise one or more chemical modifications, such as phosphorothioate (PS) bond(s), 2′-O-methylated (2′-Ome) nucleotides, or a combination thereof. In some embodiments, the PEgRNA comprise 3′ mN*mN*mN*N and 5′mN*mN*mN* modifications, where m indicates that the nucleotide contains a 2′-O-Me modification and a * indicates the presence of a phosphorothioate bond.

[0377] Any of the PEgRNAs of Table 45 can be used in a Prime Editing system that further comprises a nick guide RNA (ngRNA). Such ngRNA can comprise a spacer comprising at its 3′ end a sequence corresponding to nucleotides 4-20 of any ngRNA spacer listed in Table 45 and a gRNA core capable of complexing with a Cas9 protein. For example, the sequence in the spacer of the ngRNA can comprise nucleotides 4-20, 3-20, 2-20, or 1-20 of sequence number 2885, 2559, 2886, 2573, 2887, 2888, 2561, 2889, 2890, 2891, 2892, 2893, 2569, 2894, 2895, or 2896. In some embodiments, the spacer of the ngRNA is a ngRNA spacer listed in Table 45. The ngRNA spacers in Table 45 are annotated with their corresponding PAM sequences, enabling selection of an appropriate Cas9 protein. It can be advantageous to select a ngRNA spacer that has a PAM sequence compatible with the Cas9 protein used in the Prime Editor, thus avoiding the need to use two different Cas9 proteins. The ngRNA is capable of directing a complexed Cas9 protein to bind the edit strand of the FANCC gene; thus, a complexed Cas9 nickase containing a nuclease inactivating mutation in the HNH domain will nick the non-edit strand. The ngRNA protospacer may or may not be in close proximity to the PEgRNA protospacer. In some embodiments, the distance between the PEgRNA nick site and the ngRNA nick site (the nick-to-nick distance) is 131 to 134 nt. In some embodiments, the distance between the PEgRNA nick site and the ngRNA nick site (the nick-to-nick distance) is up to 134 nt. The ngRNA can be a PE3 ngRNA or a PE3b ngRNA: A PE3 ngRNA spacer has perfect complementarity to the edit strand both pre- and post-edit; a PE3b ngRNA spacer has perfect complementarity to the edit strand post-edit. Exemplary ngRNA provided in Table 45 can comprise a sequence corresponding to any one of sequence numbers 2897-2900.

[0378] Any ngRNA exemplified in Table 45 can comprise, or further comprise, a 3′ motif at the 3′ end of the extension arm. In some embodiments, a 3′ motif is capable of forming a tertiary structure on its own, such as a hairpin. The 3′ motif can be connected to the 3′ end of the ngRNA via a linker sequence. The ngRNA may also comprise adaptations at the 3′ end or 5′ end. For example, the ngRNA may comprise a series of 1, 2, 3, 4, 5, 6, 7 or more additional Uracil nucleotides at the 3′ end. In some embodiments, the ngRNA comprises 4 additional Uracil nucleotides at its 3′ end. Without being bound by theory, the 3 motifs or additional Uracil nucleotides can increase PEgRNA stability. ngRNA sequences exemplified in Table 45 may be adapted for expression from a nucleic acid template with a U6 promoter, for example, by including a 5′ terminal G if the spacer of the ngRNA begins with another nucleotide. The end adaptations included in the selection of full length ngRNAs included in Table 45 are annotated in the third column (“Description”) of Table 45.

[0379] The ngRNAs exemplified in Table 45 may alternatively or additionally comprise one or more chemical modifications, such as phosphorothioate (PS) bond(s), 2′-O-methylated (2′-Ome) nucleotides, or a combination thereof. In some embodiments, the PEgRNA comprise 3′ mN*mN*mN*N and 5′mN*mN*mN* modifications, where m indicates that the nucleotide contains a 2′-O-Me modification and a * indicates the presence of a phosphorothioate bond.

[0380] Additional exemplary PEgRNAs and ngRNAs for correction of the c.456+4A->T (IVS4+4 A->T) mutation are provided in Tables 35-44 and 46-52. Tables 35-44 and 46-524 each contain three columns: the first column is the sequence number, the second column is the actual sequence, and the third column contains a description of the sequence.

[0381] The PEgRNAs exemplified in Tables 35-44 and 46-52 comprise: (a) a spacer comprising at its 3′ end a sequence corresponding to a listed PEgRNA spacer sequence; (b) a gRNA core capable of complexing with a Cas9 protein, and (c) an extension arm comprising: (i) an editing template comprising at its 3′ end an RTT sequence from the same table as the PEgRNA spacer, and (ii) a prime binding site (PBS) comprising at its 5′ end a PBS sequence from the same table as the PEgRNA spacer.

[0382] The PEgRNA spacer can be, for example, 16-22 nucleotides in length. The PEgRNA spacers in Tables 35-44 and 46-52 are annotated with their PAM sequence(s), enabling the selection of an appropriate Cas9 protein.

[0383] The editing template, or RTT, can encode a wild type FANCC sequence. Alternatively, the editing template can encode a nucleotide edit that corrects the c c.456+4A->T (IVS4+4 A->T) mutation, and further encode one or more synonymous mutations relative to the wildtype FANCC gene. In some embodiments, the editing template encodes one or more synonymous mutations that are PAM silencing mutations. The PAM silencing mutations encoded by exemplary RTTs are annotated in each of Tables 35-44 and 46-52, third column (“Description”). In some embodiments, the editing template is 10 to 40 nucleotides in length. In some embodiments, the editing template comprises at least 4 contiguous nucleotides of complementarity with the edit strand wherein the at least 4 nucleotides contiguous are located upstream of the 5′ most edit in the editing template.

[0384] The PBS can be, for example, 5 to 19 nucleotides in length. In some cases, a PBS length of no more than 3 nucleotides less than the PEgRNA spacer length is chosen. In some embodiments, a PBS length between 8 to 14 nucleotides is chosen.

[0385] The PEgRNA can comprise multiple RNA molecules or can be a single RNA molecule. In some embodiments, the PEgRNA comprises, from 5′ to 3′, the spacer, the gRNA core, the editing template, and the PBS. The 3′ end of the editing template can be contiguous with the 5′ end of the PBS. Exemplary PEgRNAs provided in Tables 35-44 and 46-52 can comprise a sequence corresponding to any one of full length PEgRNA sequences in each table. Any PEgRNA exemplified in Tables 35-44 and 46-52 can comprise, or further comprise, a 3′ motif at the 3′ end of the extension arm. In some embodiments, a 3′ motif is capable of forming a tertiary structure on its own, such as a hairpin. The 3′ motif can be connected to the 3′ end of the PBS via a linker sequence. The PEgRNA may also comprise adaptations at the 3′ end or 5′ end. For example, the PEgRNA may comprise a series of 1, 2, 3, 4, 5, 6, 7 or more additional Uracil nucleotides at the 3′ end. In some embodiments, the PEgRNA comprises 4 additional Uracil nucleotides at its 3′ end. Without being bound by theory, the 3 motifs or additional Uracil nucleotides can increase PEgRNA stability. PEgRNA sequences exemplified in Tables 35-44 and 46-52 may be adapted for expression from a nucleic acid template with a U6 promoter, for example, by including a 5′ terminal G if the spacer of the PEgRNA begins with another nucleotide. The modifications and end adaptations included in the selection of full length PEgRNAs included in Tables 35-44 and 46-52 are annotated in the third column (“Description”) of the Tables.

[0386] The PEgRNAs exemplified in Tables 35-44 and 46-52 may alternatively or additionally comprise one or more chemical modifications, such as phosphorothioate (PS) bond(s), 2′-O-methylated (2′-Ome) nucleotides, or a combination thereof. In some embodiments, the PEgRNA comprise 3′ mN*mN*mN*N and 5′mN*mN*mN* modifications, where m indicates that the nucleotide contains a 2′-O-Me modification and a * indicates the presence of a phosphorothioate bond.

[0387] Any of the PEgRNAs of Tables 35-44 and 46-52 can be used in a Prime Editing system that further comprises a nick guide RNA (ngRNA). Such ngRNA can comprise a spacer comprising at its 3′ end a sequence corresponding to nucleotides 4-20 of any ngRNA spacer listed in the same Table as the PEgRNA and a gRNA core capable of complexing with a Cas9 protein. In some embodiments, the spacer of the ngRNA is a ngRNA spacer listed in the same Table as the PEgRNA. The ngRNA spacers in each of Tables 35-44 and 46-52 are annotated with their corresponding PAM sequences, enabling selection of an appropriate Cas9 protein. It can be advantageous to select a ngRNA spacer that has a PAM sequence compatible with the Cas9 protein used in the Prime Editor, thus avoiding the need to use two different Cas9 proteins. The ngRNA is capable of directing a complexed Cas9 protein to bind the edit strand of the FANCC gene; thus, a complexed Cas9 nickase containing a nuclease inactivating mutation in the HNH domain will nick the non-edit strand. The ngRNA protospacer may or may not be in close proximity to the PEgRNA protospacer. The ngRNA can be a PE3 ngRNA or a PE3b ngRNA: A PE3 ngRNA spacer has perfect complementarity to the edit strand both pre- and post-edit; a PE3b ngRNA spacer has perfect complementarity to the edit strand post-edit. A PE3 or PE3b ngRNA spacer in Tables 35-44 and 46-52 annotated with a “*” and the same number code as an RTT in the same Table has perfect complementarity to the edit strand post-edit by a PEgRNA containing the RTT. Exemplary ngRNA provided in Tables 35-44 and 46-52 can comprise a sequence corresponding to any one of the full length ngRNAs provided in the Tables.

[0388] Any ngRNA exemplified in Tables 35-44 and 46-52 can comprise, or further comprise, a 3′ motif at the 3′ end of the extension arm. In some embodiments, a 3′ motif is capable of forming a tertiary structure on its own, such as a hairpin. The 3′ motif can be connected to the 3′ end of the ngRNA via a linker sequence. The ngRNA may also comprise adaptations at the 3′ end or 5′ end. For example, the ngRNA may comprise a series of 1, 2, 3, 4, 5, 6, 7 or more additional Uracil nucleotides at the 3′ end. In some embodiments, the ngRNA comprises 4 additional Uracil nucleotides at its 3′ end. Without being bound by theory, the 3 motifs or additional Uracil nucleotides can increase PEgRNA stability. ngRNA sequences exemplified in Tables 35-44 and 46-52 may be adapted for expression from a nucleic acid template with a U6 promoter, for example, by including a 5′ terminal G if the spacer of the ngRNA begins with another nucleotide. The modifications and end adaptations included in the selection of full length ngRNAs included in Tables 35-44 and 46-52 are annotated in the third column (“Description”) of the Tables.

[0389] The ngRNA exemplified in Tables 35-44 and 46-52 may alternatively or additionally comprise one or more chemical modifications, such as phosphorothioate (PS) bond(s), 2′-O-methylated (2′-Ome) nucleotides, or a combination thereof. In some embodiments, the PEgRNA comprise 3′ mN*mN*mN*N and 5′mN*mN*mN* modifications, where m indicates that the nucleotide contains a 2′-O-Me modification and a * indicates the presence of a phosphorothioate bond.

TABLE 1

| Sequence | | |
|---|---|---|
| Number | Sequence | Description |
| 1 | TGAGCCACGTGAAGACA (SEQ ID NO: 1) | PEgRNA spacer (GG PAM) |
| 2 | CTGAGCCACGTGAAGACA (SEQ ID NO: 2) | PEgRNA spacer (GG PAM) |
| 3 | ACTGAGCCACGTGAAGACA (SEQ ID NO: 3) | PEgRNA spacer (GG PAM) |
| 4 | AACTGAGCCACGTGAAGACA (SEQ ID NO: 4) | PEgRNA spacer (GG PAM) |
| 5 | GAACTGAGCCACGTGAAGACA (SEQ ID NO: 5) | PEgRNA spacer (GG PAM) |
| 6 | GGAACTGAGCCACGTGAAGACA (SEQ ID NO: 6) | PEgRNA spacer (GG PAM) |
| 7 | CTTCA | PBS |
| 8 | CTTCAC | PBS |
| 9 | CTTCACG | PBS |
| 10 | CTTCACGT | PBS |
| 11 | CTTCACGTG | PBS |
| 12 | CTTCACGTGG (SEQ ID NO: 12) | PBS |
| 13 | CTTCACGTGGC (SEQ ID NO: 13) | PBS |
| 14 | CTTCACGTGGCT (SEQ ID NO: 14) | PBS |
| 15 | CTTCACGTGGCTC (SEQ ID NO: 15) | PBS |
| 16 | CTTCACGTGGCTCA (SEQ ID NO: 16) | PBS |
| 17 | CTTCACGTGGCTCAG (SEQ ID NO: 17) | PBS |
| 18 | CTTCACGTGGCTCAGT (SEQ ID NO: 18) | PBS |
| 19 | CTTCACGTGGCTCAGTT (SEQ ID NO: 19) | PBS |
| 20 | CTTCACGTGGCTCAGTTC (SEQ ID NO: 20) | PBS |
| 21 | CTTCACGTGGCTCAGTTCC (SEQ ID NO: 21) | PBS |
| 22 | GATCAGGCTTCCACTTTGGAAACCCAGCAAGAC | RTT |
| | ACCTGT (SEQ ID NO: 22) | |
| 23 | GGATCAGGCTTCCACTTTGGAAACCCAGCAAGA | RTT |
| | CACCTGT (SEQ ID NO: 23) | |
| 24 | AAGATGGCTCAAGATTCAGT (SEQ ID NO: 24) | PE3 ngRNA spacer (AG PAM) |
| 25 | AAGATTCAGTAGATCTTTCT (SEQ ID NO: 25) | PE3 ngRNA spacer (TG PAM) |
| 26 | AAGCTTTCTGTATGGGATCA (SEQ ID NO: 26) | PE3b ngRNA spacer (GG PAM) |
| 27 | AGATCTTTCTTGTGATTATC (SEQ ID NO: 27) | PE3 ngRNA spacer (AG PAM) |
| 28 | ATGGGATCAGGCTTCCACTT (SEQ ID NO: 28) | PE3b ngRNA spacer (TG PAM) |
| 29 | CCTTTTCGCTTTTTCCAAGA (SEQ ID NO: 29) | PE3 ngRNA spacer (TG PAM) |
| 30 | CTTTTCGCTTTTTCCAAGAT (SEQ ID NO: 30) | PE3 ngRNA spacer (GG PAM) |
| 31 | GAAGCTTTCTGTATGGGATC (SEQ ID NO: 31) | PE3b ngRNA spacer (AG PAM) |
| 32 | GATGCAGAAGCTTTCTGTAT (SEQ ID NO: 32) | PE3 ngRNA spacer (GG PAM) |
| 33 | GATTCAGTAGATCTTTCTTG (SEQ ID NO: 33) | PE3 ngRNA spacer (TG PAM) |
| 34 | GCTTTTTCCAAGATGGCTCA (SEQ ID NO: 34) | PE3 ngRNA spacer (AG PAM) |
| 35 | GGATGCAGAAGCTTTCTGTA (SEQ ID NO: 35) | PE3 ngRNA spacer (TG PAM) |
| 36 | GGCTTCCACTTTGGAAACCC (SEQ ID NO: 36) | PE3 ngRNA spacer (AG PAM) |
| 37 | GTGAAGGGACATCACCTTTT (SEQ ID NO: 37) | PE3 ngRNA spacer (CG PAM) |
| 38 | TCACCTTTTCGCTTTTTCCA (SEQ ID NO: 38) | PE3 ngRNA spacer (AG PAM) |
| 39 | TCCAAGATGGCTCAAGATTC (SEQ ID NO: 39) | PE3 ngRNA spacer (AG PAM) |
| 40 | TCCACTTTGGAAACCCAGCA (SEQ ID NO: 40) | PE3 ngRNA spacer (AG PAM) |
| 41 | TGATTATCAGTTTTGGATGC (SEQ ID NO: 41) | PE3 ngRNA spacer (AG PAM) |
| 42 | TGGAAACCCAGCAAGACACC (SEQ ID NO: 42) | PE3 ngRNA spacer (TG PAM) |
| 43 | TGGGATCAGGCTTCCACTTT (SEQ ID NO: 43) | PE3b ngRNA spacer (GG PAM) |
| 44 | TTATCAGTTTTGGATGCAGA (SEQ ID NO: 44) | PE3 ngRNA spacer (AG PAM) |
| 45 | TTCTTGTGATTATCAGTTTT (SEQ ID NO: 45) | PE3 ngRNA spacer (GG PAM) |
| 46 | TTGTGATTATCAGTTTTGGA (SEQ ID NO: 46) | PE3 ngRNA spacer (TG PAM) |
| 47 | TTTCTTGTGATTATCAGTTT (SEQ ID NO: 47) | PE3 ngRNA spacer (TG PAM) |
| 48 | TTTTGGATGCAGAAGCTTTC (SEQ ID NO: 48) | PE3 ngRNA spacer (TG PAM) |
| 49 | TTTCTTGTGATTATCAGTTTGTTTTAGAGCTAGAA | PE3 ngRNA (TG PAM) |
| | ATAGCAAGTTAAAATAAGGCTAGTCCGTTATCAA | |
| | CTTGAAAAAGTGGCACCGAGTCGGTGC (SEQ ID | |
| | NO: 49) | |
| 50 | GGATGCAGAAGCTTTCTGTAGTTTTAGAGCTAGA | PE3 ngRNA (TG PAM) |
| | AATAGCAAGTTAAAATAAGGCTAGTCCGTTATCA | |
| | ACTTGAAAAAGTGGCACCGAGTCGGTGC (SEQ ID | |
| | NO: 50) | |
| 51 | GAAGCTTTCTGTATGGGATCGTTTTAGAGCTAGA | PE3b ngRNA (AG PAM) |
| | AATAGCAAGTTAAAATAAGGCTAGTCCGTTATCA | |
| | ACTTGAAAAAGTGGCACCGAGTCGGTGC (SEQ ID | |
| | NO: 51) | |
| 52 | ATGGGATCAGGCTTCCACTTGTTTTAGAGCTAGA | PE3b ngRNA (TG PAM) |
| | AATAGCAAGTTAAAATAAGGCTAGTCCGTTATCA | |
| | ACTTGAAAAAGTGGCACCGAGTCGGTGC (SEQ ID | |
| | NO: 52) | |
| 53 | GGATGCAGAAGCTTTCTGTAGTTTTAGAGCTAGA | PE3 ngRNA (TG PAM), contains end |
| | AATAGCAAGTTAAAATAAGGCTAGTCCGTTATCA | adaptations |
| | ACTTGAAAAAGTGGCACCGAGTCGGTGCTTTT | |
| | (SEQ ID NO: 53) | |
| 54 | GAAGCTTTCTGTATGGGATCGTTTTAGAGCTAGA | PE3b ngRNA (AG PAM), contains end |
| | AATAGCAAGTTAAAATAAGGCTAGTCCGTTATCA | adaptations |
| | ACTTGAAAAAGTGGCACCGAGTCGGTGCTTTT | |
| | (SEQ ID NO: 54) | |
| 55 | GTTTCTTGTGATTATCAGTTTGTTTTAGAGCTAGA | PE3 ngRNA (TG PAM), contains end |
| | AATAGCAAGTTAAAATAAGGCTAGTCCGTTATCA | adaptations |
| | ACTTGAAAAAGTGGCACCGAGTCGGTGCTTTT | |
| | (SEQ ID NO: 55) | |
| 56 | GATGGGATCAGGCTTCCACTTGTTTTAGAGCTAG | PE3b ngRNA (TG PAM), contains end |
| | AAATAGCAAGTTAAAATAAGGCTAGTCCGTTATC | adaptations |
| | AACTTGAAAAAGTGGCACCGAGTCGGTGCTTTT | |
| | (SEQ ID NO: 56) | |
| 57 | GGATGCAGAAGCTTTCTGTAGTTTTAGAGCTAGA | PE3 ngRNA (TG PAM), contains linker |
| | AATAGCAAGTTAAAATAAGGCTAGTCCGTTATCA | sequence AACATTGA; hairpin SEQ ID |
| | ACTTGAAAAAGTGGCACCGAGTCGGTGCAACAT | NO: 3591; end adaptations |
| | TGACGCGTCTCTACGTGGGGGCGCGTTTT (SEQ | |
| | ID NO: 57) | |
| 58 | GAAGCTTTCTGTATGGGATCGTTTTAGAGCTAGA | PE3b ngRNA (AG PAM), contains linker |
| | AATAGCAAGTTAAAATAAGGCTAGTCCGTTATCA | sequence AACATTGA; hairpin SEQ ID |
| | ACTTGAAAAAGTGGCACCGAGTCGGTGCAACAT | NO: 3591; end adaptations |
| | TGACGCGTCTCTACGTGGGGGCGCGTTTT (SEQ | |
| | ID NO: 58) | |
| 59 | GTTTCTTGTGATTATCAGTTTGTTTTAGAGCTAGA | PE3 ngRNA (TG PAM), contains linker |
| | AATAGCAAGTTAAAATAAGGCTAGTCCGTTATCA | sequence AACATTGA; hairpin SEQ ID |
| | ACTTGAAAAAGTGGCACCGAGTCGGTGCAACAT | NO: 3591; end adaptations |
| | TGACGCGTCTCTACGTGGGGGCGCGTTTT (SEQ | |
| | ID NO: 59) | |
| 60 | GATGGGATCAGGCTTCCACTTGTTTTAGAGCTAG | PE3b ngRNA (TG PAM), contains linker |
| | AAATAGCAAGTTAAAATAAGGCTAGTCCGTTATC | sequence AACATTGA; hairpin SEQ ID |
| | AACTTGAAAAAGTGGCACCGAGTCGGTGCAACA | NO: 3591; end adaptations |
| | TTGACGCGTCTCTACGTGGGGGCGCGTTTT (SEQ | |
| | ID NO: 60) | |

TABLE 2

| Sequence | | |
|---|---|---|
| Number | Sequence | Description |
| 61 | TGAAGACAGGTGTCTTG (SEQ ID NO: 61) | PEgRNA spacer (CTGG; CTGGGT PAM) |
| 62 | GTGAAGACAGGTGTCTTG (SEQ ID NO: 62) | PEgRNA spacer (CTGG; CTGGGT PAM) |
| 63 | CGTGAAGACAGGTGTCTTG (SEQ ID NO: 63) | PEgRNA spacer (CTGG; CTGGGT PAM) |
| 64 | ACGTGAAGACAGGTGTCTTG (SEQ ID NO: 64) | PEgRNA spacer (CTGG; CTGGGT PAM) |
| 65 | CACGTGAAGACAGGTGTCTTG (SEQ ID NO: 65) | PEgRNA spacer (CTGG; CTGGGT PAM) |
| 66 | CCACGTGAAGACAGGTGTCTTG (SEQ ID NO: 66) | PEgRNA spacer (CTGG; CTGGGT PAM) |
| 67 | GACAC | PBS |
| 68 | GACACC | PBS |
| 69 | GACACCT | PBS |
| 70 | GACACCTG | PBS |
| 71 | GACACCTGT | PBS |
| 72 | GACACCTGTC (SEQ ID NO: 72) | PBS |
| 73 | GACACCTGTCT (SEQ ID NO: 73) | PBS |
| 74 | GACACCTGTCTT (SEQ ID NO: 74) | PBS |
| 75 | GACACCTGTCTTC (SEQ ID NO: 75) | PBS |
| 76 | GACACCTGTCTTCA (SEQ ID NO: 76) | PBS |
| 77 | GACACCTGTCTTCAC (SEQ ID NO: 77) | PBS |
| 78 | GACACCTGTCTTCACG (SEQ ID NO: 78) | PBS |
| 79 | GACACCTGTCTTCACGT (SEQ ID NO: 79) | PBS |
| 80 | GACACCTGTCTTCACGTG (SEQ ID NO: 80) | PBS |
| 81 | GACACCTGTCTTCACGTGG (SEQ ID NO: 81) | PBS |
| 82 | GATCAGGCTTCCACTTTGGAAACACAGCAA (SEQ | RTT (CTGG-to-CTGT; CTGGGT-to- |
| | ID NO: 82) | CTGTGT PAM silencing edit) |
| 83 | GATCAGGCTTCCACTTTGGAAACCCAGCAA (SEQ | RTT |
| | ID NO: 83) | |
| 84 | GATCAGGCTTCCACTTTGGAAACGCAGCAA (SEQ | RTT (CTGG-to-CTGC; CTGGGT-to- |
| | ID NO: 84) | CTGCGT PAM silencing edit) |
| 85 | GATCAGGCTTCCACTTTGGAAACTCAGCAA (SEQ | RTT (CTGG-to-CTGA PAM silencing edit) |
| | ID NO: 85) | |
| 86 | GGATCAGGCTTCCACTTTGGAAACACAGCAA | RTT (CTGG-to-CTGT; CTGGGT-to- |
| | (SEQ ID NO: 86) | CTGTGT PAM silencing edit) |
| 87 | GGATCAGGCTTCCACTTTGGAAACCCAGCAA | RTT |
| | (SEQ ID NO: 87) | |
| 88 | GGATCAGGCTTCCACTTTGGAAACGCAGCAA | RTT (CTGG-to-CTGC; CTGGGT-to- |
| | (SEQ ID NO: 88) | CTGCGT PAM silencing edit) |
| 89 | GGATCAGGCTTCCACTTTGGAAACTCAGCAA | RTT (CTGG-to-CTGA PAM silencing edit) |
| | (SEQ ID NO: 89) | |
| 90 | GGGATCAGGCTTCCACTTTGGAAACACAGCAA | RTT (CTGG-to-CTGT; CTGGGT-to- |
| | (SEQ ID NO: 90) | CTGTGT PAM silencing edit) |
| 91 | GGGATCAGGCTTCCACTTTGGAAACCCAGCAA | RTT |
| | (SEQ ID NO: 91) | |
| 92 | GGGATCAGGCTTCCACTTTGGAAACGCAGCAA | RTT (CTGG-to-CTGC; CTGGGT-to- |
| | (SEQ ID NO: 92) | CTGCGT PAM silencing edit) |
| 93 | GGGATCAGGCTTCCACTTTGGAAACTCAGCAA | RTT (CTGG-to-CTGA PAM silencing edit) |
| | (SEQ ID NO: 93) | |
| 94 | TGGGATCAGGCTTCCACTTTGGAAACACAGCAA | RTT (CTGG-to-CTGT; CTGGGT-to- |
| | (SEQ ID NO: 94) | CTGTGT PAM silencing edit) |
| 95 | TGGGATCAGGCTTCCACTTTGGAAACCCAGCAA | RTT |
| | (SEQ ID NO: 95) | |
| 96 | TGGGATCAGGCTTCCACTTTGGAAACGCAGCAA | RTT (CTGG-to-CTGC; CTGGGT-to- |
| | (SEQ ID NO: 96) | CTGCGT PAM silencing edit) |
| 97 | TGGGATCAGGCTTCCACTTTGGAAACTCAGCAA | RTT (CTGG-to-CTGA PAM silencing edit) |
| | (SEQ ID NO: 97) | |
| 98 | ATGGGATCAGGCTTCCACTTTGGAAACACAGCA | RTT (CTGG-to-CTGT; CTGGGT-to- |
| | A (SEQ ID NO: 98) | CTGTGT PAM silencing edit) |
| 99 | ATGGGATCAGGCTTCCACTTTGGAAACCCAGCA | RTT |
| | A (SEQ ID NO: 99) | |
| 100 | ATGGGATCAGGCTTCCACTTTGGAAACGCAGCA | RTT (CTGG-to-CTGC; CTGGGT-to- |
| | A (SEQ ID NO: 100) | CTGCGT PAM silencing edit) |
| 101 | ATGGGATCAGGCTTCCACTTTGGAAACTCAGCAA | RTT (CTGG-to-CTGA PAM silencing edit) |
| | (SEQ ID NO: 101) | |
| 102 | TATGGGATCAGGCTTCCACTTTGGAAACACAGCA | RTT (CTGG-to-CTGT; CTGGGT-to- |
| | A (SEQ ID NO: 102) | CTGTGT PAM silencing edit) |
| 103 | TATGGGATCAGGCTTCCACTTTGGAAACCCAGCA | RTT |
| | A (SEQ ID NO: 103) | |
| 104 | TATGGGATCAGGCTTCCACTTTGGAAACGCAGCA | RTT (CTGG-to-CTGC; CTGGGT-to- |
| | A (SEQ ID NO: 104) | CTGCGT PAM silencing edit) |
| 105 | TATGGGATCAGGCTTCCACTTTGGAAACTCAGCA | RTT (CTGG-to-CTGA PAM silencing edit) |
| | A (SEQ ID NO: 105) | |
| 106 | GTATGGGATCAGGCTTCCACTTTGGAAACACAGC | RTT (CTGG-to-CTGT; CTGGGT-to- |
| | AA (SEQ ID NO: 106) | CTGTGT PAM silencing edit) |
| 107 | GTATGGGATCAGGCTTCCACTTTGGAAACCCAGC | RTT |
| | AA (SEQ ID NO: 107) | |
| 108 | GTATGGGATCAGGCTTCCACTTTGGAAACGCAGC | RTT (CTGG-to-CTGC; CTGGGT-to- |
| | AA (SEQ ID NO: 108) | CTGCGT PAM silencing edit) |
| 109 | GTATGGGATCAGGCTTCCACTTTGGAAACTCAGC | RTT (CTGG-to-CTGA PAM silencing edit) |
| | AA (SEQ ID NO: 109) | |
| 110 | TGTATGGGATCAGGCTTCCACTTTGGAAACACAG | RTT (CTGG-to-CTGT; CTGGGT-to- |
| | CAA (SEQ ID NO: 110) | CTGTGT PAM silencing edit) |
| 111 | TGTATGGGATCAGGCTTCCACTTTGGAAACCCAG | RTT |
| | CAA (SEQ ID NO: 111) | |
| 112 | TGTATGGGATCAGGCTTCCACTTTGGAAACGCAG | RTT (CTGG-to-CTGC; CTGGGT-to- |
| | CAA (SEQ ID NO: 112) | CTGCGT PAM silencing edit) |
| 113 | TGTATGGGATCAGGCTTCCACTTTGGAAACTCAG | RTT (CTGG-to-CTGA PAM silencing edit) |
| | CAA (SEQ ID NO: 113) | |
| 114 | CTGTATGGGATCAGGCTTCCACTTTGGAAACACA | RTT (CTGG-to-CTGT; CTGGGT-to- |
| | GCAA (SEQ ID NO: 114) | CTGTGT PAM silencing edit) |
| 115 | CTGTATGGGATCAGGCTTCCACTTTGGAAACCCA | RTT |
| | GCAA (SEQ ID NO: 115) | |
| 116 | CTGTATGGGATCAGGCTTCCACTTTGGAAACGCA | RTT (CTGG-to-CTGC; CTGGGT-to- |
| | GCAA (SEQ ID NO: 116) | CTGCGT PAM silencing edit) |
| 117 | CTGTATGGGATCAGGCTTCCACTTTGGAAACTCA | RTT (CTGG-to-CTGA PAM silencing edit) |
| | GCAA (SEQ ID NO: 117) | |
| 118 | TCTGTATGGGATCAGGCTTCCACTTTGGAAACAC | RTT (CTGG-to-CTGT; CTGGGT-to- |
| | AGCAA (SEQ ID NO: 118) | CTGTGT PAM silencing edit) |
| 119 | TCTGTATGGGATCAGGCTTCCACTTTGGAAACCC | RTT |
| | AGCAA (SEQ ID NO: 119) | |
| 120 | TCTGTATGGGATCAGGCTTCCACTTTGGAAACGC | RTT (CTGG-to-CTGC; CTGGGT-to- |
| | AGCAA (SEQ ID NO: 120) | CTGCGT PAM silencing edit) |
| 121 | TCTGTATGGGATCAGGCTTCCACTTTGGAAACTC | RTT (CTGG-to-CTGA PAM silencing edit) |
| | AGCAA (SEQ ID NO: 121) | |
| 122 | TTCTGTATGGGATCAGGCTTCCACTTTGGAAACA | RTT (CTGG-to-CTGT; CTGGGT-to- |
| | CAGCAA (SEQ ID NO: 122) | CTGTGT PAM silencing edit) |
| 123 | TTCTGTATGGGATCAGGCTTCCACTTTGGAAACC | RTT |
| | CAGCAA (SEQ ID NO: 123) | |
| 124 | TTCTGTATGGGATCAGGCTTCCACTTTGGAAACG | RTT (CTGG-to-CTGC; CTGGGT-to- |
| | CAGCAA (SEQ ID NO: 124) | CTGCGT PAM silencing edit) |
| 125 | TTCTGTATGGGATCAGGCTTCCACTTTGGAAACT | RTT (CTGG-to-CTGA PAM silencing edit) |
| | CAGCAA (SEQ ID NO: 125) | |
| 25 | AAGATTCAGTAGATCTTTCT (SEQ ID NO: 25) | PE3 ngRNA spacer (TGTGAT PAM) |
| 126 | ACCTTTTCGCTTTTTCCAAG (SEQ ID NO: 126) | PE3 ngRNA spacer (ATGG PAM) |
| 127 | AGAAGCTTTCTGTATGGGAT (SEQ ID NO: 127) | PE3b ngRNA spacer (CAGG PAM) |
| 128 | AGTAGATCTTTCTTGTGATT (SEQ ID NO: 128) | PE3 ngRNA spacer (ATCAGT PAM) |
| 129 | CATCACCTTTTCGCTTTTTC (SEQ ID NO: 129) | PE3 ngRNA spacer (CAAGAT PAM) |
| 130 | CCAAGATGGCTCAAGATTCA (SEQ ID NO: 130) | PE3 ngRNA spacer (GTAGAT PAM) |
| 131 | CTTTCTTGTGATTATCAGTT (SEQ ID NO: 131) | PE3 ngRNA spacer (TTGG; TTGGAT PAM) |
| 132 | TATGGGATCAGGCTTCCACT (SEQ ID NO: 132) | PE3b ngRNA spacer (TTGG PAM) |
| 133 | TCGCTTTTTCCAAGATGGCT (SEQ ID NO: 133) | PE3 ngRNA spacer (CAAGAT PAM) |
| 134 | TGGATGCAGAAGCTTTCTGT (SEQ ID NO: 134) | PE3 ngRNA spacer (ATGG; ATGGAT PAM) |
| 135 | TTTTCCAAGATGGCTCAAGA (SEQ ID NO: 135) | PE3 ngRNA spacer (TTCAGT PAM) |

TABLE 3

| Sequence | | |
|---|---|---|
| Number | Sequence | Description |
| 136 | AGCTTTCTGTATGGATC (SEQ ID NO: 136) | PEgRNA spacer (AG; AGG PAM) |
| 137 | AAGCTTTCTGTATGGATC (SEQ ID NO: 137) | PEgRNA spacer (AG; AGG PAM) |
| 138 | GAAGCTTTCTGTATGGATC (SEQ ID NO: 138) | PEgRNA spacer (AG; AGG PAM) |
| 139 | AGAAGCTTTCTGTATGGATC (SEQ ID NO: 139) | PEgRNA spacer (AG; AGG PAM) |
| 140 | CAGAAGCTTTCTGTATGGATC (SEQ ID NO: 140) | PEgRNA spacer (AG; AGG PAM) |
| 141 | GCAGAAGCTTTCTGTATGGATC (SEQ ID NO: 141) | PEgRNA spacer (AG; AGG PAM) |
| 142 | CCATA | PBS |
| 143 | CCATAC | PBS |
| 144 | CCATACA | PBS |
| 145 | CCATACAG | PBS |
| 146 | CCATACAGA | PBS |
| 147 | CCATACAGAA (SEQ ID NO: 147) | PBS |
| 148 | CCATACAGAAA (SEQ ID NO: 148) | PBS |
| 149 | CCATACAGAAAG (SEQ ID NO: 149) | PBS |
| 150 | CCATACAGAAAGC (SEQ ID NO: 150) | PBS |
| 151 | CCATACAGAAAGCT (SEQ ID NO: 151) | PBS |
| 152 | CCATACAGAAAGCTT (SEQ ID NO: 152) | PBS |
| 153 | CCATACAGAAAGCTTC (SEQ ID NO: 153) | PBS |
| 154 | CCATACAGAAAGCTTCT (SEQ ID NO: 154) | PBS |
| 155 | CCATACAGAAAGCTTCTG (SEQ ID NO: 155) | PBS |
| 156 | CCATACAGAAAGCTTCTGC (SEQ ID NO: 156) | PBS |
| 157 | AAGCCTGATC (SEQ ID NO: 157) | RTT |
| 158 | AAGCTTGATC (SEQ ID NO: 158) | RTT (AG-to-AA; AGG-to-AAG PAM |
| | | silencing edit) |
| 159 | GAAGCCTGATC (SEQ ID NO: 159) | RTT |
| 160 | GGAAGCCTGATC (SEQ ID NO: 160) | RTT |
| 161 | GGAAGCTTGATC (SEQ ID NO: 161) | RTT (AG-to-AA; AGG-to-AAG PAM |
| | | silencing edit) |
| 162 | TGGAAGCCTGATC (SEQ ID NO: 162) | RTT |
| 163 | GTGGAAGCCTGATC (SEQ ID NO: 163) | RTT |
| 164 | GTGGAAGCTTGATC (SEQ ID NO: 164) | RTT (AG-to-AA; AGG-to-AAG PAM |
| | | silencing edit) |
| 165 | AGTGGAAGCCTGATC (SEQ ID NO: 165) | RTT |
| 166 | AAGTGGAAGCCTGATC (SEQ ID NO: 166) | RTT |
| 167 | AAGTGGAAGCTTGATC (SEQ ID NO: 167) | RTT (AG-to-AA; AGG-to-AAG PAM |
| | | silencing edit) |
| 168 | AAAGTGGAAGCCTGATC (SEQ ID NO: 168) | RTT |
| 169 | CAAAGTGGAAGCCTGATC (SEQ ID NO: 169) | RTT |
| 170 | CCAAAGTGGAAGCCTGATC (SEQ ID NO: 170) | RTT |
| 171 | TCCAAAGTGGAAGCCTGATC (SEQ ID NO: 171) | RTT |
| 172 | TTCCAAAGTGGAAGCCTGATC (SEQ ID NO: 172) | RTT |
| 173 | TTTCCAAAGTGGAAGCCTGATC (SEQ ID NO: 173) | RTT |
| 174 | GTTTCCAAAGTGGAAGCCTGATC (SEQ ID NO: | RTT |
| | 174) | |
| 175 | GGTTTCCAAAGTGGAAGCCTGATC (SEQ ID NO: | RTT |
| | 175) | |
| 176 | GGGTTTCCAAAGTGGAAGCCTGATC (SEQ ID NO: | RTT |
| | 176) | |
| 177 | TGGGTTTCCAAAGTGGAAGCCTGATC (SEQ ID | RTT |
| | NO: 177) | |
| 178 | CTGGGTTTCCAAAGTGGAAGCCTGATC (SEQ ID | RTT |
| | NO: 178) | |
| 179 | GCTGGGTTTCCAAAGTGGAAGCCTGATC (SEQ ID | RTT |
| | NO: 179) | |
| 180 | TGCTGGGTTTCCAAAGTGGAAGCCTGATC (SEQ | RTT |
| | ID NO: 180) | |
| 181 | TTGCTGGGTTTCCAAAGTGGAAGCCTGATC (SEQ | RTT |
| | ID NO: 181) | |
| 182 | TTGCTGGGTTTCCAAAGTGGAAGCTTGATC (SEQ | RTT (AG-to-AA; AGG-to-AAG PAM |
| | ID NO: 182) | silencing edit) |
| 183 | CTTGCTGGGTTTCCAAAGTGGAAGCCTGATC | RTT |
| | (SEQ ID NO: 183) | |
| 184 | TCTTGCTGGGTTTCCAAAGTGGAAGCCTGATC | RTT |
| | (SEQ ID NO: 184) | |
| 185 | TCTTGCTGGGTTTCCAAAGTGGAAGCTTGATC | RTT (AG-to-AA; AGG-to-AAG PAM |
| | (SEQ ID NO: 185) | silencing edit) |
| 186 | GTCTTGCTGGGTTTCCAAAGTGGAAGCCTGATC | RTT |
| | (SEQ ID NO: 186) | |
| 187 | TGTCTTGCTGGGTTTCCAAAGTGGAAGCCTGATC | RTT |
| | (SEQ ID NO: 187) | |
| 188 | TGTCTTGCTGGGTTTCCAAAGTGGAAGCTTGATC | RTT (AG-to-AA; AGG-to-AAG PAM |
| | (SEQ ID NO: 188) | silencing edit) |
| 189 | GTGTCTTGCTGGGTTTCCAAAGTGGAAGCCTGAT | RTT |
| | C (SEQ ID NO: 189) | |
| 190 | GGTGTCTTGCTGGGTTTCCAAAGTGGAAGCCTGA | RTT |
| | TC (SEQ ID NO: 190) | |
| 191 | AGGTGTCTTGCTGGGTTTCCAAAGTGGAAGCCTG | RTT |
| | ATC (SEQ ID NO: 191) | |
| 192 | CAGGTGTCTTGCTGGGTTTCCAAAGTGGAAGCCT | RTT |
| | GATC (SEQ ID NO: 192) | |
| 193 | ACAGGTGTCTTGCTGGGTTTCCAAAGTGGAAGCC | RTT |
| | TGATC (SEQ ID NO: 193) | |
| 194 | GACAGGTGTCTTGCTGGGTTTCCAAAGTGGAAGC | RTT |
| | CTGATC (SEQ ID NO: 194) | |
| 4 | AACTGAGCCACGTGAAGACA (SEQ ID NO: 4) | PE3 ngRNA spacer (GG PAM) |
| 195 | ACATCTTCCTTAGGAACTCC (SEQ ID NO: 195) | PE3 ngRNA spacer (TG; TGG PAM) |
| 196 | ACTACTTACCATCTCTTTCA (SEQ ID NO: 196) | PE3 ngRNA spacer (AG; AGG PAM) |
| 197 | ACTCCTGGAACTGAGCCACG (SEQ ID NO: 197) | PE3 ngRNA spacer (TG PAM) |
| 198 | AGAAAATAATTTCATTATTC (SEQ ID NO: 198) | PE3 ngRNA spacer (TG; TGG PAM) |
| 199 | AGGCTTCATACATCTTCCTT (SEQ ID NO: 199) | PE3 ngRNA spacer (AG; AGG PAM) |
| 200 | CATCTTCCTTAGGAACTCCT (SEQ ID NO: 200) | PE3 ngRNA spacer (GG PAM) |
| 201 | CCACGTGAAGACAGGTGTCT (SEQ ID NO: 201) | PE3 ngRNA spacer (TG PAM) |
| 202 | CCTGGAACTGAGCCACGTGA (SEQ ID NO: 202) | PE3 ngRNA spacer (AG PAM) |
| 203 | CGTGAAGACAGGTGTCTTGC (SEQ ID NO: 203) | PE3 ngRNA spacer (TG; TGG PAM) |
| 204 | CTACTTACCATCTCTTTCAA (SEQ ID NO: 204) | PE3 ngRNA spacer (GG PAM) |
| 205 | CTGAGCCACGTGAAGACAGG (SEQ ID NO: 205) | PE3 ngRNA spacer (TG PAM) |
| 206 | CTTAGGAACTCCTGGAACTG (SEQ ID NO: 206) | PE3 ngRNA spacer (AG PAM) |
| 207 | GAAAATAATTTCATTATTCT (SEQ ID NO: 207) | PE3 ngRNA spacer (GG PAM) |
| 208 | GAACTCCTGGAACTGAGCCA (SEQ ID NO: 208) | PE3 ngRNA spacer (CG PAM) |
| 209 | GAACTGAGCCACGTGAAGAC (SEQ ID NO: 209) | PE3 ngRNA spacer (AG; AGG PAM) |
| 210 | GGCTTCATACATCTTCCTTA (SEQ ID NO: 210) | PE3 ngRNA spacer (GG PAM) |
| 211 | GGGTTTCCAAAGTGGAAGCC (SEQ ID NO: 211) | PE3 ngRNA spacer (TG PAM) |
| 212 | GTCTTGCTGGGTTTCCAAAG (SEQ ID NO: 212) | PE3 ngRNA spacer (TG; TGG PAM) |
| 213 | GTGAAGACAGGTGTCTTGCT (SEQ ID NO: 213) | PE3 ngRNA spacer (GG; GGG PAM) |
| 214 | GTGTCTTGCTGGGTTTCCAA (SEQ ID NO: 214) | PE3 ngRNA spacer (AG PAM) |
| 215 | TCCTTAGGAACTCCTGGAAC (SEQ ID NO: 215) | PE3 ngRNA spacer (TG PAM) |
| 216 | TCTTGCTGGGTTTCCAAAGT (SEQ ID NO: 216) | PE3 ngRNA spacer (GG PAM) |
| 217 | TGAAGACAGGTGTCTTGCTG (SEQ ID NO: 217) | PE3 ngRNA spacer (GG PAM) |
| 218 | TGCTGGGTTTCCAAAGTGGA (SEQ ID NO: 218) | PE3 ngRNA spacer (AG PAM) |
| 219 | AGAAGCTTTCTGTATGGATCGTTTTAGAGCTAGA | pegRNA |
| | AATAGCAAGTTAAAATAAGGCTAGTCCGTTATCA | |
| | ACTTGAAAAAGTGGCACCGAGTCGGTGCAAGCC | |
| | TGATCCCATACAG (SEQ ID NO: 219) | |
| 220 | AGAAGCTTTCTGTATGGATCGTTTTAGAGCTAGA | pegRNA (AG-to-AA; AGG-to-AAG PAM |
| | AATAGCAAGTTAAAATAAGGCTAGTCCGTTATCA | silencing edit) |
| | ACTTGAAAAAGTGGCACCGAGTCGGTGCAAGCT | |
| | TGATCCCATACAG (SEQ ID NO: 220) | |
| 221 | AGAAGCTTTCTGTATGGATCGTTTTAGAGCTAGA | pegRNA |
| | AATAGCAAGTTAAAATAAGGCTAGTCCGTTATCA | |
| | ACTTGAAAAAGTGGCACCGAGTCGGTGCAAGCC | |
| | TGATCCCATACAGAA (SEQ ID NO: 221) | |
| 222 | AGAAGCTTTCTGTATGGATCGTTTTAGAGCTAGA | pegRNA |
| | AATAGCAAGTTAAAATAAGGCTAGTCCGTTATCA | |
| | ACTTGAAAAAGTGGCACCGAGTCGGTGCGGAAG | |
| | CCTGATCCCATACAG (SEQ ID NO: 222) | |
| 223 | AGAAGCTTTCTGTATGGATCGTTTTAGAGCTAGA | pegRNA (AG-to-AA; AGG-to-AAG PAM |
| | AATAGCAAGTTAAAATAAGGCTAGTCCGTTATCA | silencing edit) |
| | ACTTGAAAAAGTGGCACCGAGTCGGTGCAAGCT | |
| | TGATCCCATACAGAA (SEQ ID NO: 223) | |
| 224 | AGAAGCTTTCTGTATGGATCGTTTTAGAGCTAGA | pegRNA (AG-to-AA; AGG-to-AAG PAM |
| | AATAGCAAGTTAAAATAAGGCTAGTCCGTTATCA | silencing edit) |
| | ACTTGAAAAAGTGGCACCGAGTCGGTGCGGAAG | |
| | CTTGATCCCATACAG (SEQ ID NO: 224) | |
| 225 | AGAAGCTTTCTGTATGGATCGTTTTAGAGCTAGA | pegRNA |
| | AATAGCAAGTTAAAATAAGGCTAGTCCGTTATCA | |
| | ACTTGAAAAAGTGGCACCGAGTCGGTGCAAGCC | |
| | TGATCCCATACAGAAAG (SEQ ID NO: 225) | |
| 226 | AGAAGCTTTCTGTATGGATCGTTTTAGAGCTAGA | pegRNA |
| | AATAGCAAGTTAAAATAAGGCTAGTCCGTTATCA | |
| | ACTTGAAAAAGTGGCACCGAGTCGGTGCGGAAG | |
| | CCTGATCCCATACAGAA (SEQ ID NO: 226) | |
| 227 | AGAAGCTTTCTGTATGGATCGTTTTAGAGCTAGA | pegRNA |
| | AATAGCAAGTTAAAATAAGGCTAGTCCGTTATCA | |
| | ACTTGAAAAAGTGGCACCGAGTCGGTGCGTGGA | |
| | AGCCTGATCCCATACAG (SEQ ID NO: 227) | |
| 228 | AGAAGCTTTCTGTATGGATCGTTTTAGAGCTAGA | pegRNA, contains 3′ TTTT |
| | AATAGCAAGTTAAAATAAGGCTAGTCCGTTATCA | |
| | ACTTGAAAAAGTGGCACCGAGTCGGTGCAAGCC | |
| | TGATCCCATACAGTTTT (SEQ ID NO: 228) | |
| 229 | AGAAGCTTTCTGTATGGATCGTTTTAGAGCTAGA | pegRNA (AG-to-AA; AGG-to-AAG PAM |
| | AATAGCAAGTTAAAATAAGGCTAGTCCGTTATCA | silencing edit), contains 3′ TTTT |
| | ACTTGAAAAAGTGGCACCGAGTCGGTGCAAGCT | |
| | TGATCCCATACAGTTTT (SEQ ID NO: 229) | |
| 230 | AGAAGCTTTCTGTATGGATCGTTTTAGAGCTAGA | pegRNA (AG-to-AA; AGG-to-AAG PAM |
| | AATAGCAAGTTAAAATAAGGCTAGTCCGTTATCA | silencing edit) |
| | ACTTGAAAAAGTGGCACCGAGTCGGTGCAAGCT | |
| | TGATCCCATACAGAAAG (SEQ ID NO: 230) | |
| 231 | AGAAGCTTTCTGTATGGATCGTTTTAGAGCTAGA | pegRNA (AG-to-AA; AGG-to-AAG PAM |
| | AATAGCAAGTTAAAATAAGGCTAGTCCGTTATCA | silencing edit) |
| | ACTTGAAAAAGTGGCACCGAGTCGGTGCGGAAG | |
| | CTTGATCCCATACAGAA (SEQ ID NO: 231) | |
| 232 | AGAAGCTTTCTGTATGGATCGTTTTAGAGCTAGA | pegRNA (AG-to-AA; AGG-to-AAG PAM |
| | AATAGCAAGTTAAAATAAGGCTAGTCCGTTATCA | silencing edit) |
| | ACTTGAAAAAGTGGCACCGAGTCGGTGCGTGGA | |
| | AGCTTGATCCCATACAG (SEQ ID NO: 232) | |
| 233 | GAGAAGCTTTCTGTATGGATCGTTTTAGAGCTAG | pegRNA, contains 3′ TTTT; 5′G |
| | AAATAGCAAGTTAAAATAAGGCTAGTCCGTTATC | |
| | AACTTGAAAAAGTGGCACCGAGTCGGTGCAAGC | |
| | CTGATCCCATACAGTTTT (SEQ ID NO: 233) | |
| 234 | AGAAGCTTTCTGTATGGATCGTTTTAGAGCTAGA | pegRNA |
| | AATAGCAAGTTAAAATAAGGCTAGTCCGTTATCA | |
| | ACTTGAAAAAGTGGCACCGAGTCGGTGCAAGCC | |
| | TGATCCCATACAGAAAGCT (SEQ ID NO: 234) | |
| 235 | AGAAGCTTTCTGTATGGATCGTTTTAGAGCTAGA | pegRNA |
| | AATAGCAAGTTAAAATAAGGCTAGTCCGTTATCA | |
| | ACTTGAAAAAGTGGCACCGAGTCGGTGCGGAAG | |
| | CCTGATCCCATACAGAAAG (SEQ ID NO: 235) | |
| 236 | AGAAGCTTTCTGTATGGATCGTTTTAGAGCTAGA | pegRNA |
| | AATAGCAAGTTAAAATAAGGCTAGTCCGTTATCA | |
| | ACTTGAAAAAGTGGCACCGAGTCGGTGCGTGGA | |
| | AGCCTGATCCCATACAGAA (SEQ ID NO: 236) | |
| 237 | AGAAGCTTTCTGTATGGATCGTTTTAGAGCTAGA | pegRNA |
| | AATAGCAAGTTAAAATAAGGCTAGTCCGTTATCA | |
| | ACTTGAAAAAGTGGCACCGAGTCGGTGCAAGTG | |
| | GAAGCCTGATCCCATACAG (SEQ ID NO: 237) | |
| 238 | AGAAGCTTTCTGTATGGATCGTTTTAGAGCTAGA | pegRNA, contains 3′ TTTT |
| | AATAGCAAGTTAAAATAAGGCTAGTCCGTTATCA | |
| | ACTTGAAAAAGTGGCACCGAGTCGGTGCAAGCC | |
| | TGATCCCATACAGAATTTT (SEQ ID NO: 238) | |
| 239 | AGAAGCTTTCTGTATGGATCGTTTTAGAGCTAGA | pegRNA, contains 3′ TTTT |
| | AATAGCAAGTTAAAATAAGGCTAGTCCGTTATCA | |
| | ACTTGAAAAAGTGGCACCGAGTCGGTGCGGAAG | |
| | CCTGATCCCATACAGTTTT (SEQ ID NO: 239) | |
| 240 | AGAAGCTTTCTGTATGGATCGTTTTAGAGCTAGA | pegRNA (AG-to-AA; AGG-to-AAG PAM |
| | AATAGCAAGTTAAAATAAGGCTAGTCCGTTATCA | silencing edit), contains 3′ TTTT |
| | ACTTGAAAAAGTGGCACCGAGTCGGTGCAAGCT | |
| | TGATCCCATACAGAATTTT (SEQ ID NO: 240) | |
| 241 | AGAAGCTTTCTGTATGGATCGTTTTAGAGCTAGA | pegRNA (AG-to-AA; AGG-to-AAG PAM |
| | AATAGCAAGTTAAAATAAGGCTAGTCCGTTATCA | silencing edit), contains 3′ TTTT |
| | ACTTGAAAAAGTGGCACCGAGTCGGTGCGGAAG | |
| | CTTGATCCCATACAGTTTT (SEQ ID NO: 241) | |
| 242 | AGAAGCTTTCTGTATGGATCGTTTTAGAGCTAGA | pegRNA (AG-to-AA; AGG-to-AAG PAM |
| | AATAGCAAGTTAAAATAAGGCTAGTCCGTTATCA | silencing edit) |
| | ACTTGAAAAAGTGGCACCGAGTCGGTGCAAGCT | |
| | TGATCCCATACAGAAAGCT (SEQ ID NO: 242) | |
| 243 | AGAAGCTTTCTGTATGGATCGTTTTAGAGCTAGA | pegRNA (AG-to-AA; AGG-to-AAG PAM |
| | AATAGCAAGTTAAAATAAGGCTAGTCCGTTATCA | silencing edit) |
| | ACTTGAAAAAGTGGCACCGAGTCGGTGCGGAAG | |
| | CTTGATCCCATACAGAAAG (SEQ ID NO: 243) | |
| 244 | AGAAGCTTTCTGTATGGATCGTTTTAGAGCTAGA | pegRNA (AG-to-AA; AGG-to-AAG PAM |
| | AATAGCAAGTTAAAATAAGGCTAGTCCGTTATCA | silencing edit) |
| | ACTTGAAAAAGTGGCACCGAGTCGGTGCGTGGA | |
| | AGCTTGATCCCATACAGAA (SEQ ID NO: 244) | |
| 245 | AGAAGCTTTCTGTATGGATCGTTTTAGAGCTAGA | pegRNA (AG-to-AA; AGG-to-AAG PAM |
| | AATAGCAAGTTAAAATAAGGCTAGTCCGTTATCA | silencing edit) |
| | ACTTGAAAAAGTGGCACCGAGTCGGTGCAAGTG | |
| | GAAGCTTGATCCCATACAG (SEQ ID NO: 245) | |
| 246 | GAGAAGCTTTCTGTATGGATCGTTTTAGAGCTAG | pegRNA, contains 3′ TTTT; 5′G |
| | AAATAGCAAGTTAAAATAAGGCTAGTCCGTTATC | |
| | AACTTGAAAAAGTGGCACCGAGTCGGTGCAAGC | |
| | CTGATCCCATACAGAATTTT (SEQ ID NO: 246) | |
| 247 | GAGAAGCTTTCTGTATGGATCGTTTTAGAGCTAG | pegRNA, contains 3′ TTTT; 5′G |
| | AAATAGCAAGTTAAAATAAGGCTAGTCCGTTATC | |
| | AACTTGAAAAAGTGGCACCGAGTCGGTGCGGAA | |
| | GCCTGATCCCATACAGTTTT (SEQ ID NO: 247) | |
| 248 | AGAAGCTTTCTGTATGGATCGTTTTAGAGCTAGA | pegRNA |
| | AATAGCAAGTTAAAATAAGGCTAGTCCGTTATCA | |
| | ACTTGAAAAAGTGGCACCGAGTCGGTGCGGAAG | |
| | CCTGATCCCATACAGAAAGCT (SEQ ID NO: 248) | |
| 249 | AGAAGCTTTCTGTATGGATCGTTTTAGAGCTAGA | pegRNA |
| | AATAGCAAGTTAAAATAAGGCTAGTCCGTTATCA | |
| | ACTTGAAAAAGTGGCACCGAGTCGGTGCGTGGA | |
| | AGCCTGATCCCATACAGAAAG (SEQ ID NO: 249) | |
| 250 | AGAAGCTTTCTGTATGGATCGTTTTAGAGCTAGA | pegRNA |
| | AATAGCAAGTTAAAATAAGGCTAGTCCGTTATCA | |
| | ACTTGAAAAAGTGGCACCGAGTCGGTGCAAGTG | |
| | GAAGCCTGATCCCATACAGAA (SEQ ID NO: 250) | |
| 251 | AGAAGCTTTCTGTATGGATCGTTTTAGAGCTAGA | pegRNA, contains 3′ TTTT |
| | AATAGCAAGTTAAAATAAGGCTAGTCCGTTATCA | |
| | ACTTGAAAAAGTGGCACCGAGTCGGTGCAAGCC | |
| | TGATCCCATACAGAAAGTTTT (SEQ ID NO: 251) | |
| 252 | AGAAGCTTTCTGTATGGATCGTTTTAGAGCTAGA | pegRNA, contains 3′ TTTT |
| | AATAGCAAGTTAAAATAAGGCTAGTCCGTTATCA | |
| | ACTTGAAAAAGTGGCACCGAGTCGGTGCGGAAG | |
| | CCTGATCCCATACAGAATTTT (SEQ ID NO: 252) | |
| 253 | AGAAGCTTTCTGTATGGATCGTTTTAGAGCTAGA | pegRNA, contains 3′ TTTT |
| | AATAGCAAGTTAAAATAAGGCTAGTCCGTTATCA | |
| | ACTTGAAAAAGTGGCACCGAGTCGGTGCGTGGA | |
| | AGCCTGATCCCATACAGTTTT (SEQ ID NO: 253) | |
| 254 | AGAAGCTTTCTGTATGGATCGTTTTAGAGCTAGA | pegRNA (AG-to-AA; AGG-to-AAG PAM |
| | AATAGCAAGTTAAAATAAGGCTAGTCCGTTATCA | silencing edit), contains 3′ TTTT |
| | ACTTGAAAAAGTGGCACCGAGTCGGTGCAAGCT | |
| | TGATCCCATACAGAAAGTTTT (SEQ ID NO: 254) | |
| 255 | AGAAGCTTTCTGTATGGATCGTTTTAGAGCTAGA | pegRNA (AG-to-AA; AGG-to-AAG PAM |
| | AATAGCAAGTTAAAATAAGGCTAGTCCGTTATCA | silencing edit), contains 3′ TTTT |
| | ACTTGAAAAAGTGGCACCGAGTCGGTGCGGAAG | |
| | CTTGATCCCATACAGAATTTT (SEQ ID NO: 255) | |
| 256 | AGAAGCTTTCTGTATGGATCGTTTTAGAGCTAGA | pegRNA (AG-to-AA; AGG-to-AAG PAM |
| | AATAGCAAGTTAAAATAAGGCTAGTCCGTTATCA | silencing edit), contains 3′ TTTT |
| | ACTTGAAAAAGTGGCACCGAGTCGGTGCGTGGA | |
| | AGCTTGATCCCATACAGTTTT (SEQ ID NO: 256) | |
| 257 | AGAAGCTTTCTGTATGGATCGTTTTAGAGCTAGA | pegRNA (AG-to-AA; AGG-to-AAG PAM |
| | AATAGCAAGTTAAAATAAGGCTAGTCCGTTATCA | silencing edit) |
| | ACTTGAAAAAGTGGCACCGAGTCGGTGCGGAAG | |
| | CTTGATCCCATACAGAAAGCT (SEQ ID NO: 257) | |
| 258 | AGAAGCTTTCTGTATGGATCGTTTTAGAGCTAGA | pegRNA (AG-to-AA; AGG-to-AAG PAM |
| | AATAGCAAGTTAAAATAAGGCTAGTCCGTTATCA | silencing edit) |
| | ACTTGAAAAAGTGGCACCGAGTCGGTGCGTGGA | |
| | AGCTTGATCCCATACAGAAAG (SEQ ID NO: 258) | |
| 259 | AGAAGCTTTCTGTATGGATCGTTTTAGAGCTAGA | pegRNA (AG-to-AA; AGG-to-AAG PAM |
| | AATAGCAAGTTAAAATAAGGCTAGTCCGTTATCA | silencing edit) |
| | ACTTGAAAAAGTGGCACCGAGTCGGTGCAAGTG | |
| | GAAGCTTGATCCCATACAGAA (SEQ ID NO: 259) | |
| 260 | GAGAAGCTTTCTGTATGGATCGTTTTAGAGCTAG | pegRNA, contains 3′ TTTT; 5′G |
| | AAATAGCAAGTTAAAATAAGGCTAGTCCGTTATC | |
| | AACTTGAAAAAGTGGCACCGAGTCGGTGCAAGC | |
| | CTGATCCCATACAGAAAGTTTT (SEQ ID NO: 260) | |
| 261 | GAGAAGCTTTCTGTATGGATCGTTTTAGAGCTAG | pegRNA, contains 3′ TTTT; 5′G |
| | AAATAGCAAGTTAAAATAAGGCTAGTCCGTTATC | |
| | AACTTGAAAAAGTGGCACCGAGTCGGTGCGGAA | |
| | GCCTGATCCCATACAGAATTTT (SEQ ID NO: 261) | |
| 262 | GAGAAGCTTTCTGTATGGATCGTTTTAGAGCTAG | pegRNA, contains 3′ TTTT; 5′G |
| | AAATAGCAAGTTAAAATAAGGCTAGTCCGTTATC | |
| | AACTTGAAAAAGTGGCACCGAGTCGGTGCGTGG | |
| | AAGCCTGATCCCATACAGTTTT (SEQ ID NO: 262) | |
| 263 | AGAAGCTTTCTGTATGGATCGTTTTAGAGCTAGA | pegRNA |
| | AATAGCAAGTTAAAATAAGGCTAGTCCGTTATCA | |
| | ACTTGAAAAAGTGGCACCGAGTCGGTGCGTGGA | |
| | AGCCTGATCCCATACAGAAAGCT (SEQ ID NO: | |
| | 263) | |
| 264 | AGAAGCTTTCTGTATGGATCGTTTTAGAGCTAGA | pegRNA |
| | AATAGCAAGTTAAAATAAGGCTAGTCCGTTATCA | |
| | ACTTGAAAAAGTGGCACCGAGTCGGTGCAAGTG | |
| | GAAGCCTGATCCCATACAGAAAG (SEQ ID NO: | |
| | 264) | |
| 265 | AGAAGCTTTCTGTATGGATCGTTTTAGAGCTAGA | pegRNA, contains 3′ TTTT |
| | AATAGCAAGTTAAAATAAGGCTAGTCCGTTATCA | |
| | ACTTGAAAAAGTGGCACCGAGTCGGTGCAAGCC | |
| | TGATCCCATACAGAAAGCTTTTT (SEQ ID | |
| | NO: 265) | |
| 266 | AGAAGCTTTCTGTATGGATCGTTTTAGAGCTAGA | pegRNA, contains 3′ TTTT |
| | AATAGCAAGTTAAAATAAGGCTAGTCCGTTATCA | |
| | ACTTGAAAAAGTGGCACCGAGTCGGTGCGGAAG | |
| | CCTGATCCCATACAGAAAGTTTT (SEQ ID NO: | |
| | 266) | |
| 267 | AGAAGCTTTCTGTATGGATCGTTTTAGAGCTAGA | pegRNA, contains 3′ TTTT |
| | AATAGCAAGTTAAAATAAGGCTAGTCCGTTATCA | |
| | ACTTGAAAAAGTGGCACCGAGTCGGTGCGTGGA | |
| | AGCCTGATCCCATACAGAATTTT (SEQ ID NO: | |
| | 267) | |
| 268 | AGAAGCTTTCTGTATGGATCGTTTTAGAGCTAGA | pegRNA, contains 3′ TTTT |
| | AATAGCAAGTTAAAATAAGGCTAGTCCGTTATCA | |
| | ACTTGAAAAAGTGGCACCGAGTCGGTGCAAGTG | |
| | GAAGCCTGATCCCATACAGTTTT (SEQ ID NO: | |
| | 268) | |
| 269 | AGAAGCTTTCTGTATGGATCGTTTTAGAGCTAGA | pegRNA (AG-to-AA; AGG-to-AAG PAM |
| | AATAGCAAGTTAAAATAAGGCTAGTCCGTTATCA | silencing edit), contains 3′ TTTT |
| | ACTTGAAAAAGTGGCACCGAGTCGGTGCAAGCT | |
| | TGATCCCATACAGAAAGCTTTTT (SEQ ID | |
| | NO: 269) | |
| 270 | AGAAGCTTTCTGTATGGATCGTTTTAGAGCTAGA | pegRNA (AG-to-AA; AGG-to-AAG PAM |
| | AATAGCAAGTTAAAATAAGGCTAGTCCGTTATCA | silencing edit), contains 3′ TTTT |
| | ACTTGAAAAAGTGGCACCGAGTCGGTGCGGAAG | |
| | CTTGATCCCATACAGAAAGTTTT (SEQ ID | |
| | NO: 270) | |
| 271 | AGAAGCTTTCTGTATGGATCGTTTTAGAGCTAGA | pegRNA (AG-to-AA; AGG-to-AAG PAM |
| | AATAGCAAGTTAAAATAAGGCTAGTCCGTTATCA | silencing edit), contains 3′ TTTT |
| | ACTTGAAAAAGTGGCACCGAGTCGGTGCGTGGA | |
| | AGCTTGATCCCATACAGAATTTT (SEQ ID | |
| | NO: 271) | |
| 272 | AGAAGCTTTCTGTATGGATCGTTTTAGAGCTAGA | pegRNA (AG-to-AA; AGG-to-AAG PAM |
| | AATAGCAAGTTAAAATAAGGCTAGTCCGTTATCA | silencing edit), contains 3′ TTTT |
| | ACTTGAAAAAGTGGCACCGAGTCGGTGCAAGTG | |
| | GAAGCTTGATCCCATACAGTTTT (SEQ ID | |
| | NO: 272) | |
| 273 | AGAAGCTTTCTGTATGGATCGTTTTAGAGCTAGA | pegRNA (AG-to-AA; AGG-to-AAG PAM |
| | AATAGCAAGTTAAAATAAGGCTAGTCCGTTATCA | silencing edit) |
| | ACTTGAAAAAGTGGCACCGAGTCGGTGCGTGGA | |
| | AGCTTGATCCCATACAGAAAGCT (SEQ ID NO: | |
| | 273) | |
| 274 | AGAAGCTTTCTGTATGGATCGTTTTAGAGCTAGA | pegRNA (AG-to-AA; AGG-to-AAG PAM |
| | AATAGCAAGTTAAAATAAGGCTAGTCCGTTATCA | silencing edit) |
| | ACTTGAAAAAGTGGCACCGAGTCGGTGCAAGTG | |
| | GAAGCTTGATCCCATACAGAAAG (SEQ ID NO: | |
| | 274) | |
| 275 | GAGAAGCTTTCTGTATGGATCGTTTTAGAGCTAG | pegRNA, contains 3′ TTTT; 5′G |
| | AAATAGCAAGTTAAAATAAGGCTAGTCCGTTATC | |
| | AACTTGAAAAAGTGGCACCGAGTCGGTGCAAGC | |
| | CTGATCCCATACAGAAAGCTTTTT (SEQ ID NO: | |
| | 275) | |
| 276 | GAGAAGCTTTCTGTATGGATCGTTTTAGAGCTAG | pegRNA, contains 3′ TTTT; 5′G |
| | AAATAGCAAGTTAAAATAAGGCTAGTCCGTTATC | |
| | AACTTGAAAAAGTGGCACCGAGTCGGTGCGGAA | |
| | GCCTGATCCCATACAGAAAGTTTT (SEQ ID NO: | |
| | 276) | |
| 277 | GAGAAGCTTTCTGTATGGATCGTTTTAGAGCTAG | pegRNA, contains 3′ TTTT; 5′G |
| | AAATAGCAAGTTAAAATAAGGCTAGTCCGTTATC | |
| | AACTTGAAAAAGTGGCACCGAGTCGGTGCGTGG | |
| | AAGCCTGATCCCATACAGAATTTT (SEQ ID NO: | |
| | 277) | |
| 278 | GAGAAGCTTTCTGTATGGATCGTTTTAGAGCTAG | pegRNA, contains 3′ TTTT; 5′G |
| | AAATAGCAAGTTAAAATAAGGCTAGTCCGTTATC | |
| | AACTTGAAAAAGTGGCACCGAGTCGGTGCAAGT | |
| | GGAAGCCTGATCCCATACAGTTTT (SEQ ID NO: | |
| | 278) | |
| 279 | AGAAGCTTTCTGTATGGATCGTTTTAGAGCTAGA | pegRNA |
| | AATAGCAAGTTAAAATAAGGCTAGTCCGTTATCA | |
| | ACTTGAAAAAGTGGCACCGAGTCGGTGCAAGTG | |
| | GAAGCCTGATCCCATACAGAAAGCT (SEQ ID NO: | |
| | 279) | |
| 280 | AGAAGCTTTCTGTATGGATCGTTTTAGAGCTAGA | pegRNA, contains 3′ TTTT |
| | AATAGCAAGTTAAAATAAGGCTAGTCCGTTATCA | |
| | ACTTGAAAAAGTGGCACCGAGTCGGTGCGGAAG | |
| | CCTGATCCCATACAGAAAGCTTTTT (SEQ ID NO: | |
| | 280) | |
| 281 | AGAAGCTTTCTGTATGGATCGTTTTAGAGCTAGA | pegRNA, contains 3′ TTTT |
| | AATAGCAAGTTAAAATAAGGCTAGTCCGTTATCA | |
| | ACTTGAAAAAGTGGCACCGAGTCGGTGCGTGGA | |
| | AGCCTGATCCCATACAGAAAGTTTT (SEQ ID NO: | |
| | 281) | |
| 282 | AGAAGCTTTCTGTATGGATCGTTTTAGAGCTAGA | pegRNA, contains 3′ TTTT |
| | AATAGCAAGTTAAAATAAGGCTAGTCCGTTATCA | |
| | ACTTGAAAAAGTGGCACCGAGTCGGTGCAAGTG | |
| | GAAGCCTGATCCCATACAGAATTTT (SEQ ID NO: | |
| | 282) | |
| 283 | AGAAGCTTTCTGTATGGATCGTTTTAGAGCTAGA | pegRNA (AG-to-AA; AGG-to-AAG PAM |
| | AATAGCAAGTTAAAATAAGGCTAGTCCGTTATCA | silencing edit), contains 3′ TTTT |
| | ACTTGAAAAAGTGGCACCGAGTCGGTGCGGAAG | |
| | CTTGATCCCATACAGAAAGCTTTTT (SEQ ID NO: | |
| | 283) | |
| 284 | AGAAGCTTTCTGTATGGATCGTTTTAGAGCTAGA | pegRNA (AG-to-AA; AGG-to-AAG PAM |
| | AATAGCAAGTTAAAATAAGGCTAGTCCGTTATCA | silencing edit), contains 3′ TTTT |
| | ACTTGAAAAAGTGGCACCGAGTCGGTGCGTGGA | |
| | AGCTTGATCCCATACAGAAAGTTTT (SEQ ID NO: | |
| | 284) | |
| 285 | AGAAGCTTTCTGTATGGATCGTTTTAGAGCTAGA | pegRNA (AG-to-AA; AGG-to-AAG PAM |
| | AATAGCAAGTTAAAATAAGGCTAGTCCGTTATCA | silencing edit), contains 3′ TTTT |
| | ACTTGAAAAAGTGGCACCGAGTCGGTGCAAGTG | |
| | GAAGCTTGATCCCATACAGAATTTT (SEQ ID NO: | |
| | 285) | |
| 286 | AGAAGCTTTCTGTATGGATCGTTTTAGAGCTAGA | pegRNA (AG-to-AA; AGG-to-AAG PAM |
| | AATAGCAAGTTAAAATAAGGCTAGTCCGTTATCA | silencing edit) |
| | ACTTGAAAAAGTGGCACCGAGTCGGTGCAAGTG | |
| | GAAGCTTGATCCCATACAGAAAGCT (SEQ ID NO: | |
| | 286) | |
| 287 | GAGAAGCTTTCTGTATGGATCGTTTTAGAGCTAG | pegRNA, contains 3′ TTTT; 5′G |
| | AAATAGCAAGTTAAAATAAGGCTAGTCCGTTATC | |
| | AACTTGAAAAAGTGGCACCGAGTCGGTGCGGAA | |
| | GCCTGATCCCATACAGAAAGCTTTTT (SEQ ID NO: | |
| | 287) | |
| 288 | GAGAAGCTTTCTGTATGGATCGTTTTAGAGCTAG | pegRNA, contains 3′ TTTT; 5′G |
| | AAATAGCAAGTTAAAATAAGGCTAGTCCGTTATC | |
| | AACTTGAAAAAGTGGCACCGAGTCGGTGCGTGG | |
| | AAGCCTGATCCCATACAGAAAGTTTT (SEQ ID | |
| | NO: 288) | |
| 289 | GAGAAGCTTTCTGTATGGATCGTTTTAGAGCTAG | pegRNA, contains 3′ TTTT; 5′G |
| | AAATAGCAAGTTAAAATAAGGCTAGTCCGTTATC | |
| | AACTTGAAAAAGTGGCACCGAGTCGGTGCAAGT | |
| | GGAAGCCTGATCCCATACAGAATTTT (SEQ ID | |
| | NO: 289) | |
| 290 | AGAAGCTTTCTGTATGGATCGTTTTAGAGCTAGA | pegRNA, contains 3′ TTTT |
| | AATAGCAAGTTAAAATAAGGCTAGTCCGTTATCA | |
| | ACTTGAAAAAGTGGCACCGAGTCGGTGCGTGGA | |
| | AGCCTGATCCCATACAGAAAGCTTTTT (SEQ ID | |
| | NO: 290) | |
| 291 | AGAAGCTTTCTGTATGGATCGTTTTAGAGCTAGA | pegRNA, contains 3′ TTTT |
| | AATAGCAAGTTAAAATAAGGCTAGTCCGTTATCA | |
| | ACTTGAAAAAGTGGCACCGAGTCGGTGCAAGTG | |
| | GAAGCCTGATCCCATACAGAAAGTTTT (SEQ ID | |
| | NO: 291) | |
| 292 | AGAAGCTTTCTGTATGGATCGTTTTAGAGCTAGA | pegRNA (AG-to-AA; AGG-to-AAG PAM |
| | AATAGCAAGTTAAAATAAGGCTAGTCCGTTATCA | silencing edit), contains 3′ TTTT |
| | ACTTGAAAAAGTGGCACCGAGTCGGTGCGTGGA | |
| | AGCTTGATCCCATACAGAAAGCTTTTT (SEQ ID | |
| | NO: 292) | |
| 293 | AGAAGCTTTCTGTATGGATCGTTTTAGAGCTAGA | pegRNA (AG-to-AA; AGG-to-AAG PAM |
| | AATAGCAAGTTAAAATAAGGCTAGTCCGTTATCA | silencing edit), contains 3′ TTTT |
| | ACTTGAAAAAGTGGCACCGAGTCGGTGCAAGTG | |
| | GAAGCTTGATCCCATACAGAAAGTTTT (SEQ ID | |
| | NO: 293) | |
| 294 | GAGAAGCTTTCTGTATGGATCGTTTTAGAGCTAG | pegRNA, contains 3′ TTTT; 5′G |
| | AAATAGCAAGTTAAAATAAGGCTAGTCCGTTATC | |
| | AACTTGAAAAAGTGGCACCGAGTCGGTGCGTGG | |
| | AAGCCTGATCCCATACAGAAAGCTTTTT (SEQ ID | |
| | NO: 294) | |
| 295 | GAGAAGCTTTCTGTATGGATCGTTTTAGAGCTAG | pegRNA, contains 3′ TTTT; 5′G |
| | AAATAGCAAGTTAAAATAAGGCTAGTCCGTTATC | |
| | AACTTGAAAAAGTGGCACCGAGTCGGTGCAAGT | |
| | GGAAGCCTGATCCCATACAGAAAGTTTT (SEQ ID | |
| | NO: 295) | |
| 296 | AGAAGCTTTCTGTATGGATCGTTTTAGAGCTAGA | pegRNA, contains 3′ TTTT |
| | AATAGCAAGTTAAAATAAGGCTAGTCCGTTATCA | |
| | ACTTGAAAAAGTGGCACCGAGTCGGTGCAAGTG | |
| | GAAGCCTGATCCCATACAGAAAGCTTTTT (SEQ | |
| | ID NO: 296) | |
| 297 | AGAAGCTTTCTGTATGGATCGTTTTAGAGCTAGA | pegRNA (AG-to-AA; AGG-to-AAG PAM |
| | AATAGCAAGTTAAAATAAGGCTAGTCCGTTATCA | silencing edit), contains 3′ TTTT |
| | ACTTGAAAAAGTGGCACCGAGTCGGTGCAAGTG | |
| | GAAGCTTGATCCCATACAGAAAGCTTTTT (SEQ | |
| | ID NO: 297) | |
| 298 | GAGAAGCTTTCTGTATGGATCGTTTTAGAGCTAG | pegRNA, contains 3′ TTTT; 5′G |
| | AAATAGCAAGTTAAAATAAGGCTAGTCCGTTATC | |
| | AACTTGAAAAAGTGGCACCGAGTCGGTGCAAGT | |
| | GGAAGCCTGATCCCATACAGAAAGCTTTTT (SEQ | |
| | ID NO: 298) | |
| 299 | AGAAGCTTTCTGTATGGATCGTTTTAGAGCTAGA | pegRNA (AG-to-AA; AGG-to-AAG PAM |
| | AATAGCAAGTTAAAATAAGGCTAGTCCGTTATCA | silencing edit) |
| | ACTTGAAAAAGTGGCACCGAGTCGGTGCTTGCTG | |
| | GGTTTCCAAAGTGGAAGCTTGATCCCATACAG | |
| | (SEQ ID NO: 299) | |
| 300 | AGAAGCTTTCTGTATGGATCGTTTTAGAGCTAGA | pegRNA (AG-to-AA; AGG-to-AAG PAM |
| | AATAGCAAGTTAAAATAAGGCTAGTCCGTTATCA | silencing edit) |
| | ACTTGAAAAAGTGGCACCGAGTCGGTGCTTGCTG | |
| | GGTTTCCAAAGTGGAAGCTTGATCCCATACAGAA | |
| | (SEQ ID NO: 300) | |
| 301 | AGAAGCTTTCTGTATGGATCGTTTTAGAGCTAGA | pegRNA (AG-to-AA; AGG-to-AAG PAM |
| | AATAGCAAGTTAAAATAAGGCTAGTCCGTTATCA | silencing edit) |
| | ACTTGAAAAAGTGGCACCGAGTCGGTGCTCTTGC | |
| | TGGGTTTCCAAAGTGGAAGCTTGATCCCATACAG | |
| | (SEQ ID NO: 301) | |
| 302 | AGAAGCTTTCTGTATGGATCGTTTTAGAGCTAGA | pegRNA (AG-to-AA; AGG-to-AAG PAM |
| | AATAGCAAGTTAAAATAAGGCTAGTCCGTTATCA | silencing edit) |
| | ACTTGAAAAAGTGGCACCGAGTCGGTGCTTGCTG | |
| | GGTTTCCAAAGTGGAAGCTTGATCCCATACAGAA | |
| | AG (SEQ ID NO: 302) | |
| 303 | AGAAGCTTTCTGTATGGATCGTTTTAGAGCTAGA | pegRNA (AG-to-AA; AGG-to-AAG PAM |
| | AATAGCAAGTTAAAATAAGGCTAGTCCGTTATCA | silencing edit) |
| | ACTTGAAAAAGTGGCACCGAGTCGGTGCTCTTGC | |
| | TGGGTTTCCAAAGTGGAAGCTTGATCCCATACAG | |
| | AA (SEQ ID NO: 303) | |
| 304 | AGAAGCTTTCTGTATGGATCGTTTTAGAGCTAGA | pegRNA (AG-to-AA; AGG-to-AAG PAM |
| | AATAGCAAGTTAAAATAAGGCTAGTCCGTTATCA | silencing edit) |
| | ACTTGAAAAAGTGGCACCGAGTCGGTGCTGTCTT | |
| | GCTGGGTTTCCAAAGTGGAAGCTTGATCCCATAC | |
| | AG (SEQ ID NO: 304) | |
| 305 | AGAAGCTTTCTGTATGGATCGTTTTAGAGCTAGA | pegRNA (AG-to-AA; AGG-to-AAG PAM |
| | AATAGCAAGTTAAAATAAGGCTAGTCCGTTATCA | silencing edit) |
| | ACTTGAAAAAGTGGCACCGAGTCGGTGCTTGCTG | |
| | GGTTTCCAAAGTGGAAGCTTGATCCCATACAGAA | |
| | AGCT (SEQ ID NO: 305) | |
| 306 | AGAAGCTTTCTGTATGGATCGTTTTAGAGCTAGA | pegRNA (AG-to-AA; AGG-to-AAG PAM |
| | AATAGCAAGTTAAAATAAGGCTAGTCCGTTATCA | silencing edit) |
| | ACTTGAAAAAGTGGCACCGAGTCGGTGCTCTTGC | |
| | TGGGTTTCCAAAGTGGAAGCTTGATCCCATACAG | |
| | AAAG (SEQ ID NO: 306) | |
| 307 | AGAAGCTTTCTGTATGGATCGTTTTAGAGCTAGA | pegRNA (AG-to-AA; AGG-to-AAG PAM |
| | AATAGCAAGTTAAAATAAGGCTAGTCCGTTATCA | silencing edit) |
| | ACTTGAAAAAGTGGCACCGAGTCGGTGCTGTCTT | |
| | GCTGGGTTTCCAAAGTGGAAGCTTGATCCCATAC | |
| | AGAA (SEQ ID NO: 307) | |
| 308 | AGAAGCTTTCTGTATGGATCGTTTTAGAGCTAGA | pegRNA (AG-to-AA; AGG-to-AAG PAM |
| | AATAGCAAGTTAAAATAAGGCTAGTCCGTTATCA | silencing edit) |
| | ACTTGAAAAAGTGGCACCGAGTCGGTGCTCTTGC | |
| | TGGGTTTCCAAAGTGGAAGCTTGATCCCATACAG | |
| | AAAGCT (SEQ ID NO: 308) | |
| 309 | AGAAGCTTTCTGTATGGATCGTTTTAGAGCTAGA | pegRNA (AG-to-AA; AGG-to-AAG PAM |
| | AATAGCAAGTTAAAATAAGGCTAGTCCGTTATCA | silencing edit) |
| | ACTTGAAAAAGTGGCACCGAGTCGGTGCTGTCTT | |
| | GCTGGGTTTCCAAAGTGGAAGCTTGATCCCATAC | |
| | AGAAAG (SEQ ID NO: 309) | |
| 310 | AGAAGCTTTCTGTATGGATCGTTTTAGAGCTAGA | pegRNA (AG-to-AA; AGG-to-AAG PAM |
| | AATAGCAAGTTAAAATAAGGCTAGTCCGTTATCA | silencing edit) |
| | ACTTGAAAAAGTGGCACCGAGTCGGTGCTGTCTT | |
| | GCTGGGTTTCCAAAGTGGAAGCTTGATCCCATAC | |
| | AGAAAGCT (SEQ ID NO: 310) | |
| 311 | GAGAAGCTTTCTGTATGGATCGTTTTAGAGCTAG | pegRNA (AG-to-AA; AGG-to-AAG PAM |
| | AAATAGCAAGTTAAAATAAGGCTAGTCCGTTATC | silencing edit), contains linker sequence |
| | AACTTGAAAAAGTGGCACCGAGTCGGTGCTTGCT | AACATTGA; hairpin SEQ ID NO: 3591; 3′ |
| | GGGTTTCCAAAGTGGAAGCTTGATCCCATACAGA | TTTT; 5′G |
| | ACATTGACGCGTCTCTACGTGGGGGCGCGTTTT | |
| | (SEQ ID NO: 311) | |
| 312 | GAGAAGCTTTCTGTATGGATCGTTTTAGAGCTAG | pegRNA (AG-to-AA; AGG-to-AAG PAM |
| | AAATAGCAAGTTAAAATAAGGCTAGTCCGTTATC | silencing edit), contains linker sequence |
| | AACTTGAAAAAGTGGCACCGAGTCGGTGCTTGCT | AACATTGA; hairpin SEQ ID NO: 3591; 3′ |
| | GGGTTTCCAAAGTGGAAGCTTGATCCCATACAGA | TTTT; 5′G |
| | AAACATTGACGCGTCTCTACGTGGGGGCGCGTTT | |
| | T (SEQ ID NO: 312) | |
| 313 | GAGAAGCTTTCTGTATGGATCGTTTTAGAGCTAG | pegRNA (AG-to-AA; AGG-to-AAG PAM |
| | AAATAGCAAGTTAAAATAAGGCTAGTCCGTTATC | silencing edit), contains linker sequence |
| | AACTTGAAAAAGTGGCACCGAGTCGGTGCTCTTG | AACATTGA; hairpin SEQ ID NO: 3591; 3′ |
| | CTGGGTTTCCAAAGTGGAAGCTTGATCCCATACA | TTTT; 5′G |
| | GAACATTGACGCGTCTCTACGTGGGGGCGCGTTT | |
| | T (SEQ ID NO: 313) | |
| 314 | GAGAAGCTTTCTGTATGGATCGTTTTAGAGCTAG | pegRNA (AG-to-AA; AGG-to-AAG PAM |
| | AAATAGCAAGTTAAAATAAGGCTAGTCCGTTATC | silencing edit), contains linker sequence |
| | AACTTGAAAAAGTGGCACCGAGTCGGTGCTTGCT | AACATTGA; hairpin SEQ ID NO: 3591; 3′ |
| | GGGTTTCCAAAGTGGAAGCTTGATCCCATACAGA | TTTT; 5′G |
| | AAGAACATTGACGCGTCTCTACGTGGGGGCGCG | |
| | TTTT (SEQ ID NO: 314) | |
| 315 | GAGAAGCTTTCTGTATGGATCGTTTTAGAGCTAG | pegRNA (AG-to-AA; AGG-to-AAG PAM |
| | AAATAGCAAGTTAAAATAAGGCTAGTCCGTTATC | silencing edit), contains linker sequence |
| | AACTTGAAAAAGTGGCACCGAGTCGGTGCTCTTG | AACATTGA; hairpin SEQ ID NO: 3591; 3′ |
| | CTGGGTTTCCAAAGTGGAAGCTTGATCCCATACA | TTTT; 5′G |
| | GAAAACATTGACGCGTCTCTACGTGGGGGCGCG | |
| | TTTT (SEQ ID NO: 315) | |
| 316 | GAGAAGCTTTCTGTATGGATCGTTTTAGAGCTAG | pegRNA (AG-to-AA; AGG-to-AAG PAM |
| | AAATAGCAAGTTAAAATAAGGCTAGTCCGTTATC | silencing edit), contains linker sequence |
| | AACTTGAAAAAGTGGCACCGAGTCGGTGCTGTCT | AACATTGA; hairpin SEQ ID NO: 3591; 3′ |
| | TGCTGGGTTTCCAAAGTGGAAGCTTGATCCCATA | TTTT; 5′G |
| | CAGAACATTGACGCGTCTCTACGTGGGGGCGCGT | |
| | TTT (SEQ ID NO: 316) | |
| 317 | GAGAAGCTTTCTGTATGGATCGTTTTAGAGCTAG | pegRNA (AG-to-AA; AGG-to-AAG PAM |
| | AAATAGCAAGTTAAAATAAGGCTAGTCCGTTATC | silencing edit), contains linker sequence |
| | AACTTGAAAAAGTGGCACCGAGTCGGTGCTTGCT | AACATTGA; hairpin SEQ ID NO: 3591; 3′ |
| | GGGTTTCCAAAGTGGAAGCTTGATCCCATACAGA | TTTT; 5′G |
| | AAGCTAACATTGACGCGTCTCTACGTGGGGGCGC | |
| | GTTTT (SEQ ID NO: 317) | |
| 318 | GAGAAGCTTTCTGTATGGATCGTTTTAGAGCTAG | pegRNA (AG-to-AA; AGG-to-AAG PAM |
| | AAATAGCAAGTTAAAATAAGGCTAGTCCGTTATC | silencing edit), contains linker sequence |
| | AACTTGAAAAAGTGGCACCGAGTCGGTGCTCTTG | AACATTGA; hairpin SEQ ID NO: 3591; 3′ |
| | CTGGGTTTCCAAAGTGGAAGCTTGATCCCATACA | TTTT; 5′G |
| | GAAAGAACATTGACGCGTCTCTACGTGGGGGCG | |
| | CGTTTT (SEQ ID NO: 318) | |
| 319 | GAGAAGCTTTCTGTATGGATCGTTTTAGAGCTAG | pegRNA (AG-to-AA; AGG-to-AAG PAM |
| | AAATAGCAAGTTAAAATAAGGCTAGTCCGTTATC | silencing edit), contains linker sequence |
| | AACTTGAAAAAGTGGCACCGAGTCGGTGCTGTCT | AACATTGA; hairpin SEQ ID NO: 3591; 3′ |
| | TGCTGGGTTTCCAAAGTGGAAGCTTGATCCCATA | TTTT; 5′G |
| | CAGAAAACATTGACGCGTCTCTACGTGGGGGCG | |
| | CGTTTT (SEQ ID NO: 319) | |
| 320 | GAGAAGCTTTCTGTATGGATCGTTTTAGAGCTAG | pegRNA (AG-to-AA; AGG-to-AAG PAM |
| | AAATAGCAAGTTAAAATAAGGCTAGTCCGTTATC | silencing edit), contains linker sequence |
| | AACTTGAAAAAGTGGCACCGAGTCGGTGCTCTTG | AACATTGA; hairpin SEQ ID NO: 3591; 3′ |
| | CTGGGTTTCCAAAGTGGAAGCTTGATCCCATACA | TTTT; 5′G |
| | GAAAGCTAACATTGACGCGTCTCTACGTGGGGG | |
| | CGCGTTTT (SEQ ID NO: 320) | |
| 321 | GAGAAGCTTTCTGTATGGATCGTTTTAGAGCTAG | pegRNA (AG-to-AA; AGG-to-AAG PAM |
| | AAATAGCAAGTTAAAATAAGGCTAGTCCGTTATC | silencing edit), contains linker sequence |
| | AACTTGAAAAAGTGGCACCGAGTCGGTGCTGTCT | AACATTGA; hairpin SEQ ID NO: 3591; 3′ |
| | TGCTGGGTTTCCAAAGTGGAAGCTTGATCCCATA | TTTT; 5′G |
| | CAGAAAGAACATTGACGCGTCTCTACGTGGGGG | |
| | CGCGTTTT (SEQ ID NO: 321) | |
| 322 | GAGAAGCTTTCTGTATGGATCGTTTTAGAGCTAG | pegRNA (AG-to-AA; AGG-to-AAG PAM |
| | AAATAGCAAGTTAAAATAAGGCTAGTCCGTTATC | silencing edit), contains linker sequence |
| | AACTTGAAAAAGTGGCACCGAGTCGGTGCTGTCT | AACATTGA; hairpin SEQ ID NO: 3591; 3′ |
| | TGCTGGGTTTCCAAAGTGGAAGCTTGATCCCATA | TTTT; 5′G |
| | CAGAAAGCTAACATTGACGCGTCTCTACGTGGG | |
| | GGCGCGTTTT (SEQ ID NO: 322) | |
| 323 | GTCTTGCTGGGTTTCCAAAGGTTTTAGAGCTAGA | PE3 ngRNA (TG; TGG PAM) |
| | AATAGCAAGTTAAAATAAGGCTAGTCCGTTATCA | |
| | ACTTGAAAAAGTGGCACCGAGTCGGTGC (SEQ ID | |
| | NO: 323) | |
| 324 | GTGAAGACAGGTGTCTTGCTGTTTTAGAGCTAGA | PE3 ngRNA (GG; GGG PAM) |
| | AATAGCAAGTTAAAATAAGGCTAGTCCGTTATCA | |
| | ACTTGAAAAAGTGGCACCGAGTCGGTGC (SEQ ID | |
| | NO: 324) | |
| 325 | CGTGAAGACAGGTGTCTTGCGTTTTAGAGCTAGA | PE3 ngRNA (TG; TGG PAM) |
| | AATAGCAAGTTAAAATAAGGCTAGTCCGTTATCA | |
| | ACTTGAAAAAGTGGCACCGAGTCGGTGC (SEQ ID | |
| | NO: 325) | |
| 326 | GAACTGAGCCACGTGAAGACGTTTTAGAGCTAG | PE3 ngRNA (AG; AGG PAM) |
| | AAATAGCAAGTTAAAATAAGGCTAGTCCGTTATC | |
| | AACTTGAAAAAGTGGCACCGAGTCGGTGC (SEQ | |
| | ID NO: 326) | |
| 327 | ACATCTTCCTTAGGAACTCCGTTTTAGAGCTAGA | PE3 ngRNA (TG; TGG PAM) |
| | AATAGCAAGTTAAAATAAGGCTAGTCCGTTATCA | |
| | ACTTGAAAAAGTGGCACCGAGTCGGTGC (SEQ ID | |
| | NO: 327) | |
| 328 | AGGCTTCATACATCTTCCTTGTTTTAGAGCTAGA | PE3 ngRNA (AG; AGG PAM) |
| | AATAGCAAGTTAAAATAAGGCTAGTCCGTTATCA | |
| | ACTTGAAAAAGTGGCACCGAGTCGGTGC (SEQ ID | |
| | NO: 328) | |
| 329 | ACTACTTACCATCTCTTTCAGTTTTAGAGCTAGA | PE3 ngRNA (AG; AGG PAM) |
| | AATAGCAAGTTAAAATAAGGCTAGTCCGTTATCA | |
| | ACTTGAAAAAGTGGCACCGAGTCGGTGC (SEQ ID | |
| | NO: 329) | |
| 330 | GTCTTGCTGGGTTTCCAAAGGTTTTAGAGCTAGA | PE3 ngRNA (TG; TGG PAM), contains 3′ |
| | AATAGCAAGTTAAAATAAGGCTAGTCCGTTATCA | TTTT |
| | ACTTGAAAAAGTGGCACCGAGTCGGTGCTTTT | |
| | (SEQ ID NO: 330) | |
| 331 | GTGAAGACAGGTGTCTTGCTGTTTTAGAGCTAGA | PE3 ngRNA (GG; GGG PAM), contains 3′ |
| | AATAGCAAGTTAAAATAAGGCTAGTCCGTTATCA | TTTT |
| | ACTTGAAAAAGTGGCACCGAGTCGGTGCTTTT | |
| | (SEQ ID NO: 331) | |
| 332 | GAACTGAGCCACGTGAAGACGTTTTAGAGCTAG | PE3 ngRNA (AG; AGG PAM), contains 3′ |
| | AAATAGCAAGTTAAAATAAGGCTAGTCCGTTATC | TTTT |
| | AACTTGAAAAAGTGGCACCGAGTCGGTGCTTTT | |
| | (SEQ ID NO: 332) | |
| 333 | GCGTGAAGACAGGTGTCTTGCGTTTTAGAGCTAG | PE3 ngRNA (TG; TGG PAM), contains 3′ |
| | AAATAGCAAGTTAAAATAAGGCTAGTCCGTTATC | TTTT; 5′G |
| | AACTTGAAAAAGTGGCACCGAGTCGGTGCTTTT | |
| | (SEQ ID NO: 333) | |
| 334 | GACATCTTCCTTAGGAACTCCGTTTTAGAGCTAG | PE3 ngRNA (TG; TGG PAM), contains 3′ |
| | AAATAGCAAGTTAAAATAAGGCTAGTCCGTTATC | TTTT; 5′G |
| | AACTTGAAAAAGTGGCACCGAGTCGGTGCTTTT | |
| | (SEQ ID NO: 334) | |
| 335 | GAGGCTTCATACATCTTCCTTGTTTTAGAGCTAG | PE3 ngRNA (AG; AGG PAM), contains 3′ |
| | AAATAGCAAGTTAAAATAAGGCTAGTCCGTTATC | TTTT; 5′G |
| | AACTTGAAAAAGTGGCACCGAGTCGGTGCTTTT | |
| | (SEQ ID NO: 335) | |
| 336 | GACTACTTACCATCTCTTTCAGTTTTAGAGCTAG | PE3 ngRNA (AG; AGG PAM), contains 3′ |
| | AAATAGCAAGTTAAAATAAGGCTAGTCCGTTATC | TTTT; 5′G |
| | AACTTGAAAAAGTGGCACCGAGTCGGTGCTTTT | |
| | (SEQ ID NO: 336) | |
| 337 | GTCTTGCTGGGTTTCCAAAGGTTTTAGAGCTAGA | PE3 ngRNA (TG; TGG PAM), contains linker |
| | AATAGCAAGTTAAAATAAGGCTAGTCCGTTATCA | sequence AACATTGA; hairpin SEQ ID |
| | ACTTGAAAAAGTGGCACCGAGTCGGTGCAACAT | NO: 3591; 3′ TTTT |
| | TGACGCGTCTCTACGTGGGGGCGCGTTTT (SEQ | |
| | ID NO: 337) | |
| 338 | GTGAAGACAGGTGTCTTGCTGTTTTAGAGCTAGA | PE3 ngRNA (TG; TGG PAM), contains linker |
| | AATAGCAAGTTAAAATAAGGCTAGTCCGTTATCA | sequence AACATTGA; hairpin SEQ ID |
| | ACTTGAAAAAGTGGCACCGAGTCGGTGCAACAT | NO: 3591; 3′ TTTT |
| | TGACGCGTCTCTACGTGGGGGCGCGTTTT (SEQ | |
| | ID NO: 338) | |
| 339 | GAACTGAGCCACGTGAAGACGTTTTAGAGCTAG | PE3 ngRNA (AG; AGG PAM), contains linker |
| | AAATAGCAAGTTAAAATAAGGCTAGTCCGTTATC | sequence AACATTGA; hairpin SEQ ID |
| | AACTTGAAAAAGTGGCACCGAGTCGGTGCAACA | NO: 3591; 3′ TTTT |
| | TTGACGCGTCTCTACGTGGGGGCGCGTTTT (SEQ | |
| | ID NO: 339) | |
| 340 | GCGTGAAGACAGGTGTCTTGCGTTTTAGAGCTAG | PE3 ngRNA (AG; AGG PAM), contains linker |
| | AAATAGCAAGTTAAAATAAGGCTAGTCCGTTATC | sequence AACATTGA; hairpin SEQ ID |
| | AACTTGAAAAAGTGGCACCGAGTCGGTGCAACA | NO: 3591; 3′ TTTT; 5′G |
| | TTGACGCGTCTCTACGTGGGGGCGCGTTTT (SEQ | |
| | ID NO: 340) | |
| 341 | GACATCTTCCTTAGGAACTCCGTTTTAGAGCTAG | PE3 ngRNA (TG; TGG PAM), contains linker |
| | AAATAGCAAGTTAAAATAAGGCTAGTCCGTTATC | sequence AACATTGA; hairpin SEQ ID |
| | AACTTGAAAAAGTGGCACCGAGTCGGTGCAACA | NO: 3591; 3′ TTTT; 5′G |
| | TTGACGCGTCTCTACGTGGGGGCGCGTTTT (SEQ | |
| | ID NO: 341) | |
| 342 | GAGGCTTCATACATCTTCCTTGTTTTAGAGCTAG | PE3 ngRNA (GG; GGG PAM), contains linker |
| | AAATAGCAAGTTAAAATAAGGCTAGTCCGTTATC | sequence AACATTGA; hairpin SEQ ID |
| | AACTTGAAAAAGTGGCACCGAGTCGGTGCAACA | NO: 3591; 3′ TTTT; 5′G |
| | TTGACGCGTCTCTACGTGGGGGCGCGTTTT (SEQ | |
| | ID NO: 342) | |
| 343 | GACTACTTACCATCTCTTTCAGTTTTAGAGCTAG | PE3 ngRNA (AG; AGG PAM), contains linker |
| | AAATAGCAAGTTAAAATAAGGCTAGTCCGTTATC | sequence AACATTGA; hairpin SEQ ID |
| | AACTTGAAAAAGTGGCACCGAGTCGGTGCAACA | NO: 3591; 3′ TTTT; 5′G |
| | TTGACGCGTCTCTACGTGGGGGCGCGTTTT (SEQ | |
| | ID NO: 343) | |
| 3592 | AGAAGCTTTCTGTATGGATCGTTTTAGAGCTAGA | pegRNA (AG-to-AA; AGG-to-AAG for |
| | AATAGCAAGTTAAAATAAGGCTAGTCCGTTATCA | pathogenic only PEgRNA spacer PAM |
| | ACTTGAAAAAGTGGCACCGAGTCGGTGCTTGCTG | silencing edit), contains linker sequence |
| | GGTTTCCAAAGTGGAAGCTTGATCCCATACAGAA | AACATTGA; hairpin SEQ ID NO: 3591 |
| | CATTGACGCGTCTCTACGTGGGGGCGCG (SEQ ID | |
| | NO: 3592) | |
| 3593 | AGAAGCTTTCTGTATGGATCGTTTTAGAGCTAGA | pegRNA (AG-to-AA; AGG-to-AAG for |
| | AATAGCAAGTTAAAATAAGGCTAGTCCGTTATCA | pathogenic only PERNA spacer PAM |
| | ACTTGAAAAAGTGGCACCGAGTCGGTGCTTGCTG | silencing edit), contains linker sequence |
| | GGTTTCCAAAGTGGAAGCTTGATCCCATACAGAA | AACATTGA; hairpin SEQ ID NO: 3591 |
| | AACATTGACGCGTCTCTACGTGGGGGCGCG (SEQ | |
| | ID NO: 3593) | |
| 3594 | AGAAGCTTTCTGTATGGATCGTTTTAGAGCTAGA | pegRNA (AG-to-AA; AGG-to-AAG for |
| | AATAGCAAGTTAAAATAAGGCTAGTCCGTTATCA | pathogenic only PEgRNA spacer PAM |
| | ACTTGAAAAAGTGGCACCGAGTCGGTGCTCTTGC | silencing edit), contains linker sequence |
| | TGGGTTTCCAAAGTGGAAGCTTGATCCCATACAG | AACATTGA; hairpin SEQ ID NO: 3591 |
| | AACATTGACGCGTCTCTACGTGGGGGCGCG (SEQ | |
| | ID NO: 3594) | |
| 3595 | AGAAGCTTTCTGTATGGATCGTTTTAGAGCTAGA | pegRNA (AG-to-AA; AGG-to-AAG for |
| | AATAGCAAGTTAAAATAAGGCTAGTCCGTTATCA | pathogenic only PEgRNA spacer PAM |
| | ACTTGAAAAAGTGGCACCGAGTCGGTGCTTGCTG | silencing edit), contains linker sequence |
| | GGTTTCCAAAGTGGAAGCTTGATCCCATACAGAA | AACATTGA; hairpin SEQ ID NO: 3591 |
| | AGAACATTGACGCGTCTCTACGTGGGGGCGCG | |
| | (SEQ ID NO: 3595) | |
| 3596 | AGAAGCTTTCTGTATGGATCGTTTTAGAGCTAGA | pegRNA (AG-to-AA; AGG-to-AAG for |
| | AATAGCAAGTTAAAATAAGGCTAGTCCGTTATCA | pathogenic only PEgRNA spacer PAM |
| | ACTTGAAAAAGTGGCACCGAGTCGGTGCTCTTGC | silencing edit), contains linker sequence |
| | TGGGTTTCCAAAGTGGAAGCTTGATCCCATACAG | AACATTGA; hairpin SEQ ID NO: 3591 |
| | AAAACATTGACGCGTCTCTACGTGGGGGCGCG | |
| | (SEQ ID NO: 3596) | |
| 3597 | AGAAGCTTTCTGTATGGATCGTTTTAGAGCTAGA | pegRNA (AG-to-AA; AGG-to-AAG for |
| | AATAGCAAGTTAAAATAAGGCTAGTCCGTTATCA | pathogenic only PEgRNA spacer PAM |
| | ACTTGAAAAAGTGGCACCGAGTCGGTGCTGTCTT | silencing edit), contains linker sequence |
| | GCTGGGTTTCCAAAGTGGAAGCTTGATCCCATAC | AACATTGA; hairpin SEQ ID NO: 3591 |
| | AGAACATTGACGCGTCTCTACGTGGGGGCGCG | |
| | (SEQ ID NO: 3597) | |
| 3598 | AGAAGCTTTCTGTATGGATCGTTTTAGAGCTAGA | pegRNA (AG-to-AA; AGG-to-AAG for |
| | AATAGCAAGTTAAAATAAGGCTAGTCCGTTATCA | pathogenic only PEgRNA spacer PAM |
| | ACTTGAAAAAGTGGCACCGAGTCGGTGCTTGCTG | silencing edit), contains linker sequence |
| | GGTTTCCAAAGTGGAAGCTTGATCCCATACAGAA | AACATTGA; hairpin SEQ ID NO: 3591 |
| | AGCTAACATTGACGCGTCTCTACGTGGGGGCGCG | |
| | (SEQ ID NO: 3598) | |
| 3599 | AGAAGCTTTCTGTATGGATCGTTTTAGAGCTAGA | pegRNA (AG-to-AA; AGG-to-AAG for |
| | AATAGCAAGTTAAAATAAGGCTAGTCCGTTATCA | pathogenic only PERNA spacer PAM |
| | ACTTGAAAAAGTGGCACCGAGTCGGTGCTCTTGC | silencing edit), contains linker sequence |
| | TGGGTTTCCAAAGTGGAAGCTTGATCCCATACAG | AACATTGA; hairpin SEQ ID NO: 3591 |
| | AAAGAACATTGACGCGTCTCTACGTGGGGGCGC | |
| | G (SEQ ID NO: 3599) | |
| 3600 | AGAAGCTTTCTGTATGGATCGTTTTAGAGCTAGA | pegRNA (AG-to-AA; AGG-to-AAG for |
| | AATAGCAAGTTAAAATAAGGCTAGTCCGTTATCA | pathogenic only PEgRNA spacer PAM |
| | ACTTGAAAAAGTGGCACCGAGTCGGTGCTGTCTT | silencing edit), contains linker sequence |
| | GCTGGGTTTCCAAAGTGGAAGCTTGATCCCATAC | AACATTGA; hairpin SEQ ID NO: 3591 |
| | AGAAAACATTGACGCGTCTCTACGTGGGGGCGC | |
| | G (SEQ ID NO: 3600) | |
| 3601 | AGAAGCTTTCTGTATGGATCGTTTTAGAGCTAGA | pegRNA (AG-to-AA; AGG-to-AAG for |
| | AATAGCAAGTTAAAATAAGGCTAGTCCGTTATCA | pathogenic only PEgRNA spacer PAM |
| | ACTTGAAAAAGTGGCACCGAGTCGGTGCTCTTGC | silencing edit), contains linker sequence |
| | TGGGTTTCCAAAGTGGAAGCTTGATCCCATACAG | AACATTGA; hairpin SEQ ID NO: 3591 |
| | AAAGCTAACATTGACGCGTCTCTACGTGGGGGC | |
| | GCG (SEQ ID NO: 3601) | |
| 3602 | AGAAGCTTTCTGTATGGATCGTTTTAGAGCTAGA | pegRNA (AG-to-AA; AGG-to-AAG for |
| | AATAGCAAGTTAAAATAAGGCTAGTCCGTTATCA | pathogenic only PERNA spacer PAM |
| | ACTTGAAAAAGTGGCACCGAGTCGGTGCTGTCTT | silencing edit), contains linker sequence |
| | GCTGGGTTTCCAAAGTGGAAGCTTGATCCCATAC | AACATTGA; hairpin SEQ ID NO: 3591 |
| | AGAAAGAACATTGACGCGTCTCTACGTGGGGGC | |
| | GCG (SEQ ID NO: 3602) | |
| 3603 | AGAAGCTTTCTGTATGGATCGTTTTAGAGCTAGA | pegRNA (AG-to-AA; AGG-to-AAG for |
| | AATAGCAAGTTAAAATAAGGCTAGTCCGTTATCA | pathogenic only PEgRNA spacer PAM |
| | ACTTGAAAAAGTGGCACCGAGTCGGTGCTGTCTT | silencing edit), contains linker sequence |
| | GCTGGGTTTCCAAAGTGGAAGCTTGATCCCATAC | AACATTGA; hairpin SEQ ID NO: 3591 |
| | AGAAAGCTAACATTGACGCGTCTCTACGTGGGG | |
| | GCGCG (SEQ ID NO: 3603) | |
| 3604 | GTCTTGCTGGGTTTCCAAAGGTTTTAGAGCTAGA | PE3 ngRNA (TG; TGG PAM), contains linker |
| | AATAGCAAGTTAAAATAAGGCTAGTCCGTTATCA | sequence AACATTGA; hairpin SEQ ID |
| | ACTTGAAAAAGTGGCACCGAGTCGGTGCAACAT | NO: 3591 |
| | TGACGCGTCTCTACGTGGGGGCGCG (SEQ ID NO: | |
| | 3604) | |
| 3605 | GTGAAGACAGGTGTCTTGCTGTTTTAGAGCTAGA | PE3 ngRNA (GG; GGG PAM), contains linker |
| | AATAGCAAGTTAAAATAAGGCTAGTCCGTTATCA | sequence AACATTGA; hairpin SEQ ID |
| | ACTTGAAAAAGTGGCACCGAGTCGGTGCAACAT | NO: 3591 |
| | TGACGCGTCTCTACGTGGGGGCGCG (SEQ ID NO: | |
| | 3605) | |
| 3606 | GAACTGAGCCACGTGAAGACGTTTTAGAGCTAG | PE3 ngRNA (AG; AGG PAM), contains linker |
| | AAATAGCAAGTTAAAATAAGGCTAGTCCGTTATC | sequence AACATTGA; hairpin SEQ ID |
| | AACTTGAAAAAGTGGCACCGAGTCGGTGCAACA | NO: 3591 |
| | TTGACGCGTCTCTACGTGGGGGCGCG (SEQ ID | |
| | NO: 3606) | |
| 3607 | CGTGAAGACAGGTGTCTTGCGTTTTAGAGCTAGA | PE3 ngRNA (TG; TGG PAM), contains linker |
| | AATAGCAAGTTAAAATAAGGCTAGTCCGTTATCA | sequence AACATTGA; hairpin SEQ ID |
| | ACTTGAAAAAGTGGCACCGAGTCGGTGCAACAT | NO: 3591 |
| | TGACGCGTCTCTACGTGGGGGCGCG (SEQ ID NO: | |
| | 3607) | |
| 3608 | ACATCTTCCTTAGGAACTCCGTTTTAGAGCTAGA | PE3 ngRNA (TG; TGG PAM), contains linker |
| | AATAGCAAGTTAAAATAAGGCTAGTCCGTTATCA | sequence AACATTGA; hairpin SEQ ID |
| | ACTTGAAAAAGTGGCACCGAGTCGGTGCAACAT | NO: 3591 |
| | TGACGCGTCTCTACGTGGGGGCGCG (SEQ ID NO: | |
| | 3608) | |
| 3609 | AGGCTTCATACATCTTCCTTGTTTTAGAGCTAGA | PE3 ngRNA (AG; AGG PAM), contains linker |
| | AATAGCAAGTTAAAATAAGGCTAGTCCGTTATCA | sequence AACATTGA; hairpin SEQ ID |
| | ACTTGAAAAAGTGGCACCGAGTCGGTGCAACAT | NO: 3591 |
| | TGACGCGTCTCTACGTGGGGGCGCG (SEQ ID NO: | |
| | 3609) | |
| 3610 | ACTACTTACCATCTCTTTCAGTTTTAGAGCTAGA | PE3 ngRNA (AG; AGG PAM), contains linker |
| | AATAGCAAGTTAAAATAAGGCTAGTCCGTTATCA | sequence AACATTGA; hairpin SEQ ID |
| | ACTTGAAAAAGTGGCACCGAGTCGGTGCAACAT | NO: 3591 |
| | TGACGCGTCTCTACGTGGGGGCGCG (SEQ ID NO: | |
| | 3610) | |

TABLE 4

| Sequence | | |
|---|---|---|
| Number | Sequence | Description |
| 344 | TCTTTCTTGTGATTATC (SEQ ID NO: 344) | PERNA spacer (AG PAM) |
| 345 | ATCTTTCTTGTGATTATC (SEQ ID NO: 345) | PERNA spacer (AG PAM) |
| 346 | GATCTTTCTTGTGATTATC (SEQ ID NO: 346) | PERNA spacer (AG PAM) |
| 27 | AGATCTTTCTTGTGATTATC (SEQ ID NO: 27) | PEgRNA spacer (AG PAM) |
| 347 | TAGATCTTTCTTGTGATTATC (SEQ ID NO: 347) | PEgRNA spacer (AG PAM) |
| 348 | GTAGATCTTTCTTGTGATTATC (SEQ ID NO: 348) | PEgRNA spacer (AG PAM) |
| 349 | AATCA | PBS |
| 350 | AATCAC | PBS |
| 351 | AATCACA | PBS |
| 352 | AATCACAA | PBS |
| 353 | AATCACAAG | PBS |
| 354 | AATCACAAGA (SEQ ID NO: 354) | PBS |
| 355 | AATCACAAGAA (SEQ ID NO: 355) | PBS |
| 356 | AATCACAAGAAA (SEQ ID NO: 356) | PBS |
| 357 | AATCACAAGAAAG (SEQ ID NO: 357) | PBS |
| 358 | AATCACAAGAAAGA (SEQ ID NO: 358) | PBS |
| 359 | AATCACAAGAAAGAT (SEQ ID NO: 359) | PBS |
| 360 | AATCACAAGAAAGATC (SEQ ID NO: 360) | PBS |
| 361 | AATCACAAGAAAGATCT (SEQ ID NO: 361) | PBS |
| 362 | AATCACAAGAAAGATCTA (SEQ ID NO: 362) | PBS |
| 363 | AATCACAAGAAAGATCTAC (SEQ ID NO: 363) | PBS |
| 364 | CCCATACAGAAAGCTTCTGCATCCAAAACTGAT | RTT*2, 3, 4 |
| | (SEQ ID NO: 364) | |
| 365 | CCCATACAGAAAGCTTCTGCATCCAAAATTGAT | RTT*1, 2, 3, 4 (AG-to-AA PAM silencing |
| | (SEQ ID NO: 365) | edit) |
| 366 | TCCCATACAGAAAGCTTCTGCATCCAAAACTGAT | RTT*2, 3, 4 |
| | (SEQ ID NO: 366) | |
| 367 | TCCCATACAGAAAGCTTCTGCATCCAAAATTGAT | RTT*1, 2, 3, 4 (AG-to-AA PAM silencing |
| | (SEQ ID NO: 367) | edit) |
| 368 | ATCCCATACAGAAAGCTTCTGCATCCAAAACTGA | RTT*2, 3, 4 |
| | T (SEQ ID NO: 368) | |
| 369 | ATCCCATACAGAAAGCTTCTGCATCCAAAATTGA | RTT*1, 2, 3, 4 (AG-to-AA PAM silencing |
| | T (SEQ ID NO: 369) | edit) |
| 370 | GATCCCATACAGAAAGCTTCTGCATCCAAAACTG | RTT*2, 3, 4 |
| | AT (SEQ ID NO: 370) | |
| 371 | GATCCCATACAGAAAGCTTCTGCATCCAAAATTG | RTT*1, 2, 3, 4 (AG-to-AA PAM silencing |
| | AT (SEQ ID NO: 371) | edit) |
| 372 | TGATCCCATACAGAAAGCTTCTGCATCCAAAACT | RTT*2, 3, 4 |
| | GAT (SEQ ID NO: 372) | |
| 373 | TGATCCCATACAGAAAGCTTCTGCATCCAAAATT | RTT*1, 2, 3, 4 (AG-to-AA PAM silencing |
| | GAT (SEQ ID NO: 373) | edit) |
| 374 | CTGATCCCATACAGAAAGCTTCTGCATCCAAAAC | RTT*2, 3, 4 |
| | TGAT (SEQ ID NO: 374) | |
| 375 | CTGATCCCATACAGAAAGCTTCTGCATCCAAAAT | RTT*1, 2, 3, 4 (AG-to-AA PAM silencing |
| | TGAT (SEQ ID NO: 375) | edit) |
| 376 | CCTGATCCCATACAGAAAGCTTCTGCATCCAAAA | RTT*2, 3, 4 |
| | CTGAT (SEQ ID NO: 376) | |
| 377 | CCTGATCCCATACAGAAAGCTTCTGCATCCAAAA | RTT*1, 2, 3, 4 (AG-to-AA PAM silencing |
| | TTGAT (SEQ ID NO: 377) | edit) |
| 378 | GCCTGATCCCATACAGAAAGCTTCTGCATCCAAA | RTT*2, 3, 4 |
| | ACTGAT (SEQ ID NO: 378) | |
| 379 | GCCTGATCCCATACAGAAAGCTTCTGCATCCAAA | RTT*1, 2, 3, 4 (AG-to-AA PAM silencing |
| | ATTGAT (SEQ ID NO: 379) | edit) |
| 380 | AAAGCTTCTGCATCCAAAAC (SEQ ID NO: 380) | PE3 ngRNA spacer (TG PAM) |
| 381 | AAAGCTTCTGCATCCAAAAT (SEQ ID NO: 381) | PE3b*1 ngRNA spacer (TG PAM) |
| 4 | AACTGAGCCACGTGAAGACA (SEQ ID NO: 4) | PE3 ngRNA spacer (GG PAM) |
| 382 | AAGCCTGATCCCATACAGAA (SEQ ID NO: 382) | PE3b*2 ngRNA spacer (AG PAM) |
| 195 | ACATCTTCCTTAGGAACTCC (SEQ ID NO: 195) | PE3 ngRNA spacer (TG PAM) |
| 197 | ACTCCTGGAACTGAGCCACG (SEQ ID NO: 197) | PE3 ngRNA spacer (TG PAM) |
| 199 | AGGCTTCATACATCTTCCTT (SEQ ID NO: 199) | PE3 ngRNA spacer (AG PAM) |
| 200 | CATCTTCCTTAGGAACTCCT (SEQ ID NO: 200) | PE3 ngRNA spacer (GG PAM) |
| 201 | CCACGTGAAGACAGGTGTCT (SEQ ID NO: 201) | PE3 ngRNA spacer (TG PAM) |
| 202 | CCTGGAACTGAGCCACGTGA (SEQ ID NO: 202) | PE3 ngRNA spacer (AG PAM) |
| 203 | CGTGAAGACAGGTGTCTTGC (SEQ ID NO: 203) | PE3 ngRNA spacer (TG PAM) |
| 205 | CTGAGCCACGTGAAGACAGG (SEQ ID NO: 205) | PE3 ngRNA spacer (TG PAM) |
| 206 | CTTAGGAACTCCTGGAACTG (SEQ ID NO: 206) | PE3 ngRNA spacer (AG PAM) |
| 208 | GAACTCCTGGAACTGAGCCA (SEQ ID NO: 208) | PE3 ngRNA spacer (CG PAM) |
| 209 | GAACTGAGCCACGTGAAGAC (SEQ ID NO: 209) | PE3 ngRNA spacer (AG PAM) |
| 383 | GATCCCATACAGAAAGCTTC (SEQ ID NO: 383) | PE3b*3 ngRNA spacer (TG PAM) |
| 210 | GGCTTCATACATCTTCCTTA (SEQ ID NO: 210) | PE3 ngRNA spacer (GG PAM) |
| 211 | GGGTTTCCAAAGTGGAAGCC (SEQ ID NO: 211) | PE3 ngRNA spacer (TG PAM) |
| 212 | GTCTTGCTGGGTTTCCAAAG (SEQ ID NO: 212) | PE3 ngRNA spacer (TG PAM) |
| 213 | GTGAAGACAGGTGTCTTGCT (SEQ ID NO: 213) | PE3 ngRNA spacer (GG PAM) |
| 384 | GTGGAAGCCTGATCCCATAC (SEQ ID NO: 384) | PE3b*4 ngRNA spacer (AG PAM) |
| 214 | GTGTCTTGCTGGGTTTCCAA (SEQ ID NO: 214) | PE3 ngRNA spacer (AG PAM) |
| 215 | TCCTTAGGAACTCCTGGAAC (SEQ ID NO: 215) | PE3 ngRNA spacer (TG PAM) |
| 216 | TCTTGCTGGGTTTCCAAAGT (SEQ ID NO: 216) | PE3 ngRNA spacer (GG PAM) |
| 217 | TGAAGACAGGTGTCTTGCTG (SEQ ID NO: 217) | PE3 ngRNA spacer (GG PAM) |
| 218 | TGCTGGGTTTCCAAAGTGGA (SEQ ID NO: 218) | PE3 ngRNA spacer (AG PAM) |
| 323 | GTCTTGCTGGGTTTCCAAAGGTTTTAGAGCTAGA | PE3 ngRNA (TG PAM) |
| | AATAGCAAGTTAAAATAAGGCTAGTCCGTTATCA | |
| | ACTTGAAAAAGTGGCACCGAGTCGGTGC (SEQ ID | |
| | NO: 323) | |
| 324 | GTGAAGACAGGTGTCTTGCTGTTTTAGAGCTAGA | PE3 ngRNA (GG PAM) |
| | AATAGCAAGTTAAAATAAGGCTAGTCCGTTATCA | |
| | ACTTGAAAAAGTGGCACCGAGTCGGTGC (SEQ ID | |
| | NO: 324) | |
| 325 | CGTGAAGACAGGTGTCTTGCGTTTTAGAGCTAGA | PE3 ngRNA (TG PAM) |
| | AATAGCAAGTTAAAATAAGGCTAGTCCGTTATCA | |
| | ACTTGAAAAAGTGGCACCGAGTCGGTGC (SEQ ID | |
| | NO: 325) | |
| 326 | GAACTGAGCCACGTGAAGACGTTTTAGAGCTAG | PE3 ngRNA (AG PAM) |
| | AAATAGCAAGTTAAAATAAGGCTAGTCCGTTATC | |
| | AACTTGAAAAAGTGGCACCGAGTCGGTGC (SEQ | |
| | ID NO: 326) | |
| 327 | ACATCTTCCTTAGGAACTCCGTTTTAGAGCTAGA | PE3 ngRNA (TG PAM) |
| | AATAGCAAGTTAAAATAAGGCTAGTCCGTTATCA | |
| | ACTTGAAAAAGTGGCACCGAGTCGGTGC (SEQ ID | |
| | NO: 327) | |
| 328 | AGGCTTCATACATCTTCCTTGTTTTAGAGCTAGA | PE3 ngRNA (AG PAM) |
| | AATAGCAAGTTAAAATAAGGCTAGTCCGTTATCA | |
| | ACTTGAAAAAGTGGCACCGAGTCGGTGC (SEQ ID | |
| | NO: 328) | |
| 330 | GTCTTGCTGGGTTTCCAAAGGTTTTAGAGCTAGA | PE3 ngRNA (TG PAM), contains end |
| | AATAGCAAGTTAAAATAAGGCTAGTCCGTTATCA | adaptations |
| | ACTTGAAAAAGTGGCACCGAGTCGGTGCTTTT | |
| | (SEQ ID NO: 330) | |
| 331 | GTGAAGACAGGTGTCTTGCTGTTTTAGAGCTAGA | PE3 ngRNA (GG PAM), contains end |
| | AATAGCAAGTTAAAATAAGGCTAGTCCGTTATCA | adaptations |
| | ACTTGAAAAAGTGGCACCGAGTCGGTGCTTTT | |
| | (SEQ ID NO: 331) | |
| 332 | GAACTGAGCCACGTGAAGACGTTTTAGAGCTAG | PE3 ngRNA (AG PAM), contains end |
| | AAATAGCAAGTTAAAATAAGGCTAGTCCGTTATC | adaptations |
| | AACTTGAAAAAGTGGCACCGAGTCGGTGCTTTT | |
| | (SEQ ID NO: 332) | |
| 333 | GCGTGAAGACAGGTGTCTTGCGTTTTAGAGCTAG | PE3 ngRNA (TG PAM), contains end |
| | AAATAGCAAGTTAAAATAAGGCTAGTCCGTTATC | adaptations |
| | AACTTGAAAAAGTGGCACCGAGTCGGTGCTTTT | |
| | (SEQ ID NO: 333) | |
| 334 | GACATCTTCCTTAGGAACTCCGTTTTAGAGCTAG | PE3 ngRNA (TG PAM), contains end |
| | AAATAGCAAGTTAAAATAAGGCTAGTCCGTTATC | adaptations |
| | AACTTGAAAAAGTGGCACCGAGTCGGTGCTTTT | |
| | (SEQ ID NO: 334) | |
| 335 | GAGGCTTCATACATCTTCCTTGTTTTAGAGCTAG | PE3 ngRNA (AG PAM), contains end |
| | AAATAGCAAGTTAAAATAAGGCTAGTCCGTTATC | adaptations |
| | AACTTGAAAAAGTGGCACCGAGTCGGTGCTTTT | |
| | (SEQ ID NO: 335) | |
| 337 | GTCTTGCTGGGTTTCCAAAGGTTTTAGAGCTAGA | PE3 ngRNA (TG PAM), contains linker |
| | AATAGCAAGTTAAAATAAGGCTAGTCCGTTATCA | sequence AACATTGA; hairpin SEQ ID |
| | ACTTGAAAAAGTGGCACCGAGTCGGTGCAACAT | NO: 3591; end adaptations |
| | TGACGCGTCTCTACGTGGGGGCGCGTTTT (SEQ | |
| | ID NO: 337) | |
| 338 | GTGAAGACAGGTGTCTTGCTGTTTTAGAGCTAGA | PE3 ngRNA (GG PAM), contains linker |
| | AATAGCAAGTTAAAATAAGGCTAGTCCGTTATCA | sequence AACATTGA; hairpin SEQ ID |
| | ACTTGAAAAAGTGGCACCGAGTCGGTGCAACAT | NO: 3591; end adaptations |
| | TGACGCGTCTCTACGTGGGGGCGCGTTTT (SEQ | |
| | ID NO: 338) | |
| 339 | GAACTGAGCCACGTGAAGACGTTTTAGAGCTAG | PE3 ngRNA (AG PAM), contains linker |
| | AAATAGCAAGTTAAAATAAGGCTAGTCCGTTATC | sequence AACATTGA; hairpin SEQ ID |
| | AACTTGAAAAAGTGGCACCGAGTCGGTGCAACA | NO: 3591; end adaptations |
| | TTGACGCGTCTCTACGTGGGGGCGCGTTTT (SEQ | |
| | ID NO: 339) | |
| 340 | GCGTGAAGACAGGTGTCTTGCGTTTTAGAGCTAG | PE3 ngRNA (TG PAM), contains linker |
| | AAATAGCAAGTTAAAATAAGGCTAGTCCGTTATC | sequence AACATTGA; hairpin SEQ ID |
| | AACTTGAAAAAGTGGCACCGAGTCGGTGCAACA | NO: 3591; end adaptations |
| | TTGACGCGTCTCTACGTGGGGGCGCGTTTT (SEQ | |
| | ID NO: 340) | |
| 341 | GACATCTTCCTTAGGAACTCCGTTTTAGAGCTAG | PE3 ngRNA (TG PAM), contains linker |
| | AAATAGCAAGTTAAAATAAGGCTAGTCCGTTATC | sequence AACATTGA; hairpin SEQ ID |
| | AACTTGAAAAAGTGGCACCGAGTCGGTGCAACA | NO: 3591; end adaptations |
| | TTGACGCGTCTCTACGTGGGGGCGCGTTTT (SEQ | |
| | ID NO: 341) | |
| 342 | GAGGCTTCATACATCTTCCTTGTTTTAGAGCTAG | PE3 ngRNA (AG PAM), contains linker |
| | AAATAGCAAGTTAAAATAAGGCTAGTCCGTTATC | sequence AACATTGA; hairpin SEQ ID |
| | AACTTGAAAAAGTGGCACCGAGTCGGTGCAACA | NO: 3591; end adaptations |
| | TTGACGCGTCTCTACGTGGGGGCGCGTTTT (SEQ | |
| | ID NO: 342) | |

TABLE 5

| Sequence | | |
|---|---|---|
| Number | Sequence | Description |
| 385 | AGATCTTTCTTGTGATT (SEQ ID NO: 385) | PEgRNA spacer (ATCAGT PAM) |
| 386 | TAGATCTTTCTTGTGATT (SEQ ID NO: 386) | PEgRNA spacer (ATCAGT PAM) |
| 387 | GTAGATCTTTCTTGTGATT (SEQ ID NO: 387) | PEgRNA spacer (ATCAGT PAM) |
| 128 | AGTAGATCTTTCTTGTGATT (SEQ ID NO: 128) | PEgRNA spacer (ATCAGT PAM) |
| 388 | CAGTAGATCTTTCTTGTGATT (SEQ ID NO: 388) | PEgRNA spacer (ATCAGT PAM) |
| 389 | TCAGTAGATCTTTCTTGTGATT (SEQ ID NO: 389) | PEgRNA spacer (ATCAGT PAM) |
| 390 | CACAA | PBS |
| 391 | CACAAG | PBS |
| 392 | CACAAGA | PBS |
| 393 | CACAAGAA | PBS |
| 394 | CACAAGAAA | PBS |
| 395 | CACAAGAAAG (SEQ ID NO: 395) | PBS |
| 396 | CACAAGAAAGA (SEQ ID NO: 396) | PBS |
| 397 | CACAAGAAAGAT (SEQ ID NO: 397) | PBS |
| 398 | CACAAGAAAGATC (SEQ ID NO: 398) | PBS |
| 399 | CACAAGAAAGATCT (SEQ ID NO: 399) | PBS |
| 400 | CACAAGAAAGATCTA (SEQ ID NO: 400) | PBS |
| 401 | CACAAGAAAGATCTAC (SEQ ID NO: 401) | PBS |
| 402 | CACAAGAAAGATCTACT (SEQ ID NO: 402) | PBS |
| 403 | CACAAGAAAGATCTACTG (SEQ ID NO: 403) | PBS |
| 404 | CACAAGAAAGATCTACTGA (SEQ ID NO: 404) | PBS |
| 405 | CCCATACAGAAAGCTTCTGCATCCAAAACTGATA | RTT |
| | AT (SEQ ID NO: 405) | |
| 406 | TCCCATACAGAAAGCTTCTGCATCCAAAACTGAT | RTT |
| | AAT (SEQ ID NO: 406) | |
| 407 | ATCCCATACAGAAAGCTTCTGCATCCAAAACTGA | RTT |
| | TAAT (SEQ ID NO: 407) | |
| 408 | GATCCCATACAGAAAGCTTCTGCATCCAAAACTG | RTT |
| | ATAAT (SEQ ID NO: 408) | |
| 409 | TGATCCCATACAGAAAGCTTCTGCATCCAAAACT | RTT |
| | GATAAT (SEQ ID NO: 409) | |
| 410 | AAGCTTCTGCATCCAAAACT (SEQ ID NO: 410) | PE3 ngRNA spacer (GATAAT PAM) |
| 64 | ACGTGAAGACAGGTGTCTTG (SEQ ID NO: 64) | PE3 ngRNA spacer (CTGGGT PAM) |
| 411 | AGAAAGCTTCTGCATCCAAA (SEQ ID NO: 411) | PE3 ngRNA spacer (ACTGAT PAM) |
| 412 | CAGGTGTCTTGCTGGGTTTC (SEQ ID NO: 412) | PE3 ngRNA spacer (CAAAGT PAM) |
| 413 | CTGGGTTTCCAAAGTGGAAG (SEQ ID NO: 413) | PE3 ngRNA spacer (CCTGAT PAM) |
| 414 | TGGAACTGAGCCACGTGAAG (SEQ ID NO: 414) | PE3 ngRNA spacer (ACAGGT PAM) |

TABLE 6

| Sequence | | |
|---|---|---|
| Number | Sequence | Description |
| 415 | ATCAGTTTTGGATGCAG (SEQ ID NO: 415) | PEgRNA spacer (AAG PAM) |
| 416 | TATCAGTTTTGGATGCAG (SEQ ID NO: 416) | PEgRNA spacer (AAG PAM) |
| 417 | TTATCAGTTTTGGATGCAG (SEQ ID NO: 417) | PEgRNA spacer (AAG PAM) |
| 418 | ATTATCAGTTTTGGATGCAG (SEQ ID NO: 418) | PEgRNA spacer (AAG PAM) |
| 419 | GATTATCAGTTTTGGATGCAG (SEQ ID NO: 419) | PEgRNA spacer (AAG PAM) |
| 420 | TGATTATCAGTTTTGGATGCAG (SEQ ID NO: 420) | PEgRNA spacer (AAG PAM) |
| 421 | CATCC | PBS |
| 422 | CATCCA | PBS |
| 423 | CATCCAA | PBS |
| 424 | CATCCAAA | PBS |
| 425 | CATCCAAAA | PBS |
| 426 | CATCCAAAAC (SEQ ID NO: 426) | PBS |
| 427 | CATCCAAAACT (SEQ ID NO: 427) | PBS |
| 428 | CATCCAAAACTG (SEQ ID NO: 428) | PBS |
| 429 | CATCCAAAACTGA (SEQ ID NO: 429) | PBS |
| 430 | CATCCAAAACTGAT (SEQ ID NO: 430) | PBS |
| 431 | CATCCAAAACTGATA (SEQ ID NO: 431) | PBS |
| 432 | CATCCAAAACTGATAA (SEQ ID NO: 432) | PBS |
| 433 | CATCCAAAACTGATAAT (SEQ ID NO: 433) | PBS |
| 434 | CATCCAAAACTGATAATC (SEQ ID NO: 434) | PBS |
| 435 | CATCCAAAACTGATAATCA (SEQ ID NO: 435) | PBS |
| 436 | CCCATACAGAAAGCTTCTG (SEQ ID NO: 436) | RTT |
| 437 | CCCATACAGAAAGTTTCTG (SEQ ID NO: 437) | RTT (AAG-to-AAA PAM silencing edit) |
| 438 | TCCCATACAGAAAGCTTCTG (SEQ ID NO: 438) | RTT |
| 439 | TCCCATACAGAAAGTTTCTG (SEQ ID NO: 439) | RTT (AAG-to-AAA PAM silencing edit) |
| 440 | ATCCCATACAGAAAGCTTCTG (SEQ ID NO: 440) | RTT |
| 441 | ATCCCATACAGAAAGTTTCTG (SEQ ID NO: 441) | RTT (AAG-to-AAA PAM silencing edit) |
| 442 | GATCCCATACAGAAAGCTTCTG (SEQ ID NO: 442) | RTT |
| 443 | GATCCCATACAGAAAGTTTCTG (SEQ ID NO: 443) | RTT (AAG-to-AAA PAM silencing edit) |
| 444 | TGATCCCATACAGAAAGCTTCTG (SEQ ID NO: | RTT |
| | 444) | |
| 445 | TGATCCCATACAGAAAGTTTCTG (SEQ ID NO: | RTT (AAG-to-AAA PAM silencing edit) |
| | 445) | |
| 446 | CTGATCCCATACAGAAAGCTTCTG (SEQ ID NO: | RTT |
| | 446) | |
| 447 | CTGATCCCATACAGAAAGTTTCTG (SEQ ID NO: | RTT (AAG-to-AAA PAM silencing edit) |
| | 447) | |
| 448 | CCTGATCCCATACAGAAAGCTTCTG (SEQ ID NO: | RTT |
| | 448) | |
| 449 | CCTGATCCCATACAGAAAGTTTCTG (SEQ ID NO: | RTT (AAG-to-AAA PAM silencing edit) |
| | 449) | |
| 450 | GCCTGATCCCATACAGAAAGCTTCTG (SEQ ID | RTT |
| | NO: 450) | |
| 451 | GCCTGATCCCATACAGAAAGTTTCTG (SEQ ID | RTT (AAG-to-AAA PAM silencing edit) |
| | NO: 451) | |
| 452 | AGCCTGATCCCATACAGAAAGCTTCTG (SEQ ID | RTT |
| | NO: 452) | |
| 453 | AGCCTGATCCCATACAGAAAGTTTCTG (SEQ ID | RTT (AAG-to-AAA PAM silencing edit) |
| | NO: 453) | |
| 454 | AAGCCTGATCCCATACAGAAAGCTTCTG (SEQ ID | RTT |
| | NO: 454) | |
| 455 | AAGCCTGATCCCATACAGAAAGTTTCTG (SEQ ID | RTT (AAG-to-AAA PAM silencing edit) |
| | NO: 455) | |
| 456 | GAAGCCTGATCCCATACAGAAAGCTTCTG (SEQ | RTT |
| | ID NO: 456) | |
| 457 | GAAGCCTGATCCCATACAGAAAGTTTCTG (SEQ | RTT (AAG-to-AAA PAM silencing edit) |
| | ID NO: 457) | |
| 458 | GGAAGCCTGATCCCATACAGAAAGCTTCTG (SEQ | RTT |
| | ID NO: 458) | |
| 459 | GGAAGCCTGATCCCATACAGAAAGTTTCTG (SEQ | RTT (AAG-to-AAA PAM silencing edit) |
| | ID NO: 459) | |
| 460 | TGGAAGCCTGATCCCATACAGAAAGCTTCTG | RTT |
| | (SEQ ID NO: 460) | |
| 461 | TGGAAGCCTGATCCCATACAGAAAGTTTCTG | RTT (AAG-to-AAA PAM silencing edit) |
| | (SEQ ID NO: 461) | |
| 462 | GTGGAAGCCTGATCCCATACAGAAAGCTTCTG | RTT |
| | (SEQ ID NO: 462) | |
| 463 | GTGGAAGCCTGATCCCATACAGAAAGTTTCTG | RTT (AAG-to-AAA PAM silencing edit) |
| | (SEQ ID NO: 463) | |
| 464 | AGTGGAAGCCTGATCCCATACAGAAAGCTTCTG | RTT |
| | (SEQ ID NO: 464) | |
| 465 | AGTGGAAGCCTGATCCCATACAGAAAGTTTCTG | RTT (AAG-to-AAA PAM silencing edit) |
| | (SEQ ID NO: 465) | |
| 466 | AAGTGGAAGCCTGATCCCATACAGAAAGCTTCT | RTT |
| | G (SEQ ID NO: 466) | |
| 467 | AAGTGGAAGCCTGATCCCATACAGAAAGTTTCTG | RTT (AAG-to-AAA PAM silencing edit) |
| | (SEQ ID NO: 467) | |
| 468 | AAAGTGGAAGCCTGATCCCATACAGAAAGCTTC | RTT |
| | TG (SEQ ID NO: 468) | |
| 469 | AAAGTGGAAGCCTGATCCCATACAGAAAGTTTCT | RTT (AAG-to-AAA PAM silencing edit) |
| | G (SEQ ID NO: 469) | |
| 470 | CAAAGTGGAAGCCTGATCCCATACAGAAAGCTT | RTT |
| | CTG (SEQ ID NO: 470) | |
| 471 | CAAAGTGGAAGCCTGATCCCATACAGAAAGTTT | RTT (AAG-to-AAA PAM silencing edit) |
| | CTG (SEQ ID NO: 471) | |
| 472 | CCAAAGTGGAAGCCTGATCCCATACAGAAAGCT | RTT |
| | TCTG (SEQ ID NO: 472) | |
| 473 | CCAAAGTGGAAGCCTGATCCCATACAGAAAGTT | RTT (AAG-to-AAA PAM silencing edit) |
| | TCTG (SEQ ID NO: 473) | |
| 474 | TCCAAAGTGGAAGCCTGATCCCATACAGAAAGC | RTT |
| | TTCTG (SEQ ID NO: 474) | |
| 475 | TCCAAAGTGGAAGCCTGATCCCATACAGAAAGT | RTT (AAG-to-AAA PAM silencing edit) |
| | TTCTG (SEQ ID NO: 475) | |
| 476 | TTCCAAAGTGGAAGCCTGATCCCATACAGAAAG | RTT |
| | CTTCTG (SEQ ID NO: 476) | |
| 477 | TTCCAAAGTGGAAGCCTGATCCCATACAGAAAG | RTT (AAG-to-AAA PAM silencing edit) |
| | TTTCTG (SEQ ID NO: 477) | |
| 478 | TTTCCAAAGTGGAAGCCTGATCCCATACAGAAA | RTT |
| | GCTTCTG (SEQ ID NO: 478) | |
| 479 | TTTCCAAAGTGGAAGCCTGATCCCATACAGAAA | RTT (AAG-to-AAA PAM silencing edit) |
| | GTTTCTG (SEQ ID NO: 479) | |
| 480 | AAGGCTTCATACATCTTCCT (SEQ ID NO: 480) | PE3 ngRNA spacer (TAG PAM) |
| 481 | AGTGGAAGCCTGATCCCATA (SEQ ID NO: 481) | PE3b ngRNA spacer (CAG PAM) |
| 482 | CACTACTTACCATCTCTTTC (SEQ ID NO: 482) | PE3 ngRNA spacer (AAG PAM) |
| 483 | CCTTAGGAACTCCTGGAACT (SEQ ID NO: 483) | PE3 ngRNA spacer (GAG PAM) |
| 484 | GAAGCCTGATCCCATACAGA (SEQ ID NO: 484) | PE3b ngRNA spacer (AAG PAM) |
| 485 | GGAACTGAGCCACGTGAAGA (SEQ ID NO: 485) | PE3 ngRNA spacer (CAG PAM) |
| 486 | GGTGTCTTGCTGGGTTTCCA (SEQ ID NO: 486) | PE3 ngRNA spacer (AAG PAM) |
| 487 | TCCTGGAACTGAGCCACGTG (SEQ ID NO: 487) | PE3 ngRNA spacer (AAG PAM) |

| | | |
|---|---|---|
| 488 | TTGCTGGGTTTCCAAAGTGG (SEQ ID NO: 488) | PE3 ngRNA spacer (AAG PAM) |

TABLE 7

| Sequence | | |
|---|---|---|
| Number | Sequence | Description |
| 489 | AAGCTTTCTGTATGGAT (SEQ ID NO: 489) | PEgRNA spacer (CAG; CAGG PAM) |
| 490 | GAAGCTTTCTGTATGGAT (SEQ ID NO: 490) | PEgRNA spacer (CAG; CAGG PAM) |
| 491 | AGAAGCTTTCTGTATGGAT (SEQ ID NO: 491) | PEgRNA spacer (CAG; CAGG PAM) |
| 492 | CAGAAGCTTTCTGTATGGAT (SEQ ID NO: 492) | PEgRNA spacer (CAG; CAGG PAM) |
| 493 | GCAGAAGCTTTCTGTATGGAT (SEQ ID NO: 493) | PEgRNA spacer (CAG; CAGG PAM) |
| 494 | TGCAGAAGCTTTTGTATGGAT (SEQ ID NO: 494) | PEgRNA spacer (CAG; CAGG PAM) |
| 495 | CATAC | PBS |
| 496 | CATACA | PBS |
| 497 | CATACAG | PBS |
| 498 | CATACAGA | PBS |
| 499 | CATACAGAA | PBS |
| 500 | CATACAGAAA (SEQ ID NO: 500) | PBS |
| 501 | CATACAGAAAG (SEQ ID NO: 501) | PBS |
| 502 | CATACAGAAAGC (SEQ ID NO: 502) | PBS |
| 503 | CATACAGAAAGCT (SEQ ID NO: 503) | PBS |
| 504 | CATACAGAAAGCTT (SEQ ID NO: 504) | PBS |
| 505 | CATACAGAAAGCTTC (SEQ ID NO: 505) | PBS |
| 506 | CATACAGAAAGCTTCT (SEQ ID NO: 506) | PBS |
| 507 | CATACAGAAAGCTTCTG (SEQ ID NO: 507) | PBS |
| 508 | CATACAGAAAGCTTCTGC (SEQ ID NO: 508) | PBS |
| 509 | CATACAGAAAGCTTCTGCA (SEQ ID NO: 509) | PBS |
| 510 | AGCCTGATCC (SEQ ID NO: 510) | RTT |
| 511 | AAGCCTGATCC (SEQ ID NO: 511) | RTT |
| 512 | GAAGCCTGATCC (SEQ ID NO: 512) | RTT |
| 513 | GGAAGCCTGATCC (SEQ ID NO: 513) | RTT |
| 514 | TGGAAGCCTGATCC (SEQ ID NO: 514) | RTT |
| 515 | GTGGAAGCCTGATCC (SEQ ID NO: 515) | RTT |
| 516 | AGTGGAAGCCTGATCC (SEQ ID NO: 516) | RTT |
| 517 | AAGTGGAAGCCTGATCC (SEQ ID NO: 517) | RTT |
| 518 | AAAGTGGAAGCCTGATCC (SEQ ID NO: 518) | RTT |
| 519 | CAAAGTGGAAGCCTGATCC (SEQ ID NO: 519) | RTT |
| 520 | CCAAAGTGGAAGCCTGATCC (SEQ ID NO: 520) | RTT |
| 521 | TCCAAAGTGGAAGCCTGATCC (SEQ ID NO: 521) | RTT |
| 522 | TTCCAAAGTGGAAGCCTGATCC (SEQ ID NO: 522) | RTT |
| 523 | TTTCCAAAGTGGAAGCCTGATCC (SEQ ID NO: | RTT |
| | 523) | |
| 524 | GTTTCCAAAGTGGAAGCCTGATCC (SEQ ID NO: | RTT |
| | 524) | |
| 525 | GGTTTCCAAAGTGGAAGCCTGATCC (SEQ ID NO: | RTT |
| | 525) | |
| 526 | GGGTTTCCAAAGTGGAAGCCTGATCC (SEQ ID | RTT |
| | NO: 526) | |
| 527 | TGGGTTTCCAAAGTGGAAGCCTGATCC (SEQ ID | RTT |
| | NO: 527) | |
| 528 | CTGGGTTTCCAAAGTGGAAGCCTGATCC (SEQ ID | RTT |
| | NO: 528) | |
| 529 | GCTGGGTTTCCAAAGTGGAAGCCTGATCC (SEQ | RTT |
| | ID NO: 529) | |
| 530 | TGCTGGGTTTCCAAAGTGGAAGCCTGATCC (SEQ | RTT |
| | ID NO: 530) | |
| 531 | TTGCTGGGTTTCCAAAGTGGAAGCCTGATCC | RTT |
| | (SEQ ID NO: 531) | |
| 532 | CTTGCTGGGTTTCCAAAGTGGAAGCCTGATCC | RTT |
| | (SEQ ID NO: 532) | |
| 533 | TCTTGCTGGGTTTCCAAAGTGGAAGCCTGATCC | RTT |
| | (SEQ ID NO: 533) | |
| 534 | GTCTTGCTGGGTTTCCAAAGTGGAAGCCTGATCC | RTT |
| | (SEQ ID NO: 534) | |
| 535 | TGTCTTGCTGGGTTTCCAAAGTGGAAGCCTGATC | RTT |
| | C (SEQ ID NO: 535) | |
| 536 | GTGTCTTGCTGGGTTTCCAAAGTGGAAGCCTGAT | RTT |
| | CC (SEQ ID NO: 536) | |
| 537 | GGTGTCTTGCTGGGTTTCCAAAGTGGAAGCCTGA | RTT |
| | TCC (SEQ ID NO: 537) | |
| 538 | AGGTGTCTTGCTGGGTTTCCAAAGTGGAAGCCTG | RTT |
| | ATCC (SEQ ID NO: 538) | |
| 539 | CAGGTGTCTTGCTGGGTTTCCAAAGTGGAAGCCT | RTT |
| | GATCC (SEQ ID NO: 539) | |
| 540 | ACAGGTGTCTTGCTGGGTTTCCAAAGTGGAAGCC | RTT |
| | TGATCC (SEQ ID NO: 540) | |
| 480 | AAGGCTTCATACATCTTCCT (SEQ ID NO: 480) | PE3 ngRNA spacer (TAG; TAGG PAM) |
| 64 | ACGTGAAGACAGGTGTCTTG (SEQ ID NO: 64) | PE3 ngRNA spacer (CTGG PAM) |
| 482 | CACTACTTACCATCTCTTTC (SEQ ID NO: 482) | PE3 ngRNA spacer (AAG; AAGG PAM) |
| 541 | CAGAAAATAATTTCATTATT (SEQ ID NO: 541) | PE3 ngRNA spacer (CTGG PAM) |
| 483 | CCTTAGGAACTCCTGGAACT (SEQ ID NO: 483) | PE3 ngRNA spacer (GAG PAM) |
| 203 | CGTGAAGACAGGTGTCTTGC (SEQ ID NO: 203) | PE3 ngRNA spacer (TGGG PAM) |
| 485 | GGAACTGAGCCACGTGAAGA (SEQ ID NO: 485) | PE3 ngRNA spacer (CAG; CAGG PAM) |
| 486 | GGTGTCTTGCTGGGTTTCCA (SEQ ID NO: 486) | PE3 ngRNA spacer (AAG PAM) |
| 542 | TACATCTTCCTTAGGAACTC (SEQ ID NO: 542) | PE3 ngRNA spacer (CTGG PAM) |
| 487 | TCCTGGAACTGAGCCACGTG (SEQ ID NO: 487) | PE3 ngRNA spacer (AAG PAM) |
| 543 | TGTCTTGCTGGGTTTCCAAA (SEQ ID NO: 543) | PE3 ngRNA spacer (GTGG PAM) |
| 488 | TTGCTGGGTTTCCAAAGTGG (SEQ ID NO: 488) | PE3 ngRNA spacer (AAG PAM) |
| 325 | CGTGAAGACAGGTGTCTTGCGTTTTAGAGCTAGA | PE3 ngRNA (TGGG PAM) |
| | AATAGCAAGTTAAAATAAGGCTAGTCCGTTATCA | |
| | ACTTGAAAAAGTGGCACCGAGTCGGTGC (SEQ ID | |
| | NO: 325) | |
| 333 | GCGTGAAGACAGGTGTCTTGCGTTTTAGAGCTAG | PE3 ngRNA (TGGG PAM), contains end |
| | AAATAGCAAGTTAAAATAAGGCTAGTCCGTTATC | adaptations |
| | AACTTGAAAAAGTGGCACCGAGTCGGTGCTTTT | |
| | (SEQ ID NO: 333) | |
| 340 | GCGTGAAGACAGGTGTCTTGCGTTTTAGAGCTAG | PE3 ngRNA (TGGG PAM), contains linker |
| | AAATAGCAAGTTAAAATAAGGCTAGTCCGTTATC | sequence AACATTGA; hairpin SEQ ID |
| | AACTTGAAAAAGTGGCACCGAGTCGGTGCAACA | NO: 3591; end adaptations |
| | TTGACGCGTCTCTACGTGGGGGCGCGTTTT (SEQ | |
| | ID NO: 340) | |

TABLE 8

| Sequence | | |
|---|---|---|
| Number | Sequence | Description |
| 544 | GTGTCTTGCTGGGTTTC (SEQ ID NO: 544) | PEgRNA spacer (CAAAGT PAM) |
| 545 | GGTGTCTTGCTGGGTTTC (SEQ ID NO: 545) | PEgRNA spacer (CAAAGT PAM) |
| 546 | AGGTGTCTTGCTGGGTTTC (SEQ ID NO: 546) | PEgRNA spacer (CAAAGT PAM) |
| 412 | CAGGTGTCTTGCTGGGTTTC (SEQ ID NO: 412) | PEgRNA spacer (CAAAGT PAM) |
| 547 | ACAGGTGTCTTGCTGGGTTTC (SEQ ID NO: 547) | PEgRNA spacer (CAAAGT PAM) |
| 548 | GACAGGTGTCTTGCTGGGTTTC (SEQ ID NO: 548) | PEgRNA spacer (CAAAGT PAM) |
| 549 | ACCCA | PBS |
| 550 | ACCCAG | PBS |
| 551 | ACCCAGC | PBS |
| 552 | ACCCAGCA | PBS |
| 553 | ACCCAGCAA | PBS |
| 554 | ACCCAGCAAG (SEQ ID NO: 554) | PBS |
| 555 | ACCCAGCAAGA (SEQ ID NO: 555) | PBS |
| 556 | ACCCAGCAAGAC (SEQ ID NO: 556) | PBS |
| 557 | ACCCAGCAAGACA (SEQ ID NO: 557) | PBS |
| 558 | ACCCAGCAAGACAC (SEQ ID NO: 558) | PBS |
| 559 | ACCCAGCAAGACACC (SEQ ID NO: 559) | PBS |
| 560 | ACCCAGCAAGACACCT (SEQ ID NO: 560) | PBS |
| 561 | ACCCAGCAAGACACCTG (SEQ ID NO: 561) | PBS |
| 562 | ACCCAGCAAGACACCTGT (SEQ ID NO: 562) | PBS |
| 563 | ACCCAGCAAGACACCTGTC (SEQ ID NO: 563) | PBS |
| 564 | GATCAGGCTTCCACATTGGAA (SEQ ID NO: 564) | RTT (CAAAGT-to-CAATGT PAM silencing |
| | | edit) |
| 565 | GATCAGGCTTCCACGTTGGAA (SEQ ID NO: 565) | RTT (CAAAGT-to-CAACGT PAM silencing |
| | | edit) |
| 566 | GATCAGGCTTCCACTTTGGAA (SEQ ID NO: 566) | RTT |
| 567 | GGATCAGGCTTCCACATTGGAA (SEQ ID NO: 567) | RTT (CAAAGT-to-CAATGT PAM silencing |
| | | edit) |
| 568 | GGATCAGGCTTCCACGTTGGAA (SEQ ID NO: 568) | RTT (CAAAGT-to-CAACGT PAM silencing |
| | | edit) |
| 569 | GGATCAGGCTTCCACTTTGGAA (SEQ ID NO: 569) | RTT |
| 570 | GGGATCAGGCTTCCACATTGGAA (SEQ ID NO: | RTT (CAAAGT-to-CAATGT PAM silencing |
| | 570) | edit) |
| 571 | GGGATCAGGCTTCCACGTTGGAA (SEQ ID NO: | RTT (CAAAGT-to-CAACGT PAM silencing |
| | 571) | edit) |
| 572 | GGGATCAGGCTTCCACTTTGGAA (SEQ ID NO: | RTT |
| | 572) | |
| 573 | TGGGATCAGGCTTCCACATTGGAA (SEQ ID NO: | RTT (CAAAGT-to-CAATGT PAM silencing |
| | 573) | edit) |
| 574 | TGGGATCAGGCTTCCACGTTGGAA (SEQ ID NO: | RTT (CAAAGT-to-CAACGT PAM silencing |
| | 574) | edit) |
| 575 | TGGGATCAGGCTTCCACTTTGGAA (SEQ ID NO: | RTT |
| | 575) | |
| 576 | ATGGGATCAGGCTTCCACATTGGAA (SEQ ID NO: | RTT (CAAAGT-to-CAATGT PAM silencing |
| | 576) | edit) |
| 577 | ATGGGATCAGGCTTCCACGTTGGAA (SEQ ID NO: | RTT (CAAAGT-to-CAACGT PAM silencing |
| | 577) | edit) |
| 578 | ATGGGATCAGGCTTCCACTTTGGAA (SEQ ID NO: | RTT |
| | 578) | |
| 579 | TATGGGATCAGGCTTCCACATTGGAA (SEQ ID | RTT (CAAAGT-to-CAATGT PAM silencing |
| | NO: 579) | edit) |
| 580 | TATGGGATCAGGCTTCCACGTTGGAA (SEQ ID | RTT (CAAAGT-to-CAACGT PAM silencing |
| | NO: 580) | edit) |
| 581 | TATGGGATCAGGCTTCCACTTTGGAA (SEQ ID | RTT |
| | NO: 581) | |
| 582 | GTATGGGATCAGGCTTCCACATTGGAA (SEQ ID | RTT (CAAAGT-to-CAATGT PAM silencing |
| | NO: 582) | edit) |
| 583 | GTATGGGATCAGGCTTCCACGTTGGAA (SEQ ID | RTT (CAAAGT-to-CAACGT PAM silencing |
| | NO: 583) | edit) |
| 584 | GTATGGGATCAGGCTTCCACTTTGGAA (SEQ ID | RTT |
| | NO: 584) | |
| 585 | TGTATGGGATCAGGCTTCCACATTGGAA (SEQ ID | RTT (CAAAGT-to-CAATGT PAM silencing |
| | NO: 585) | edit) |
| 586 | TGTATGGGATCAGGCTTCCACGTTGGAA (SEQ ID | RTT (CAAAGT-to-CAACGT PAM silencing |
| | NO: 586) | edit) |
| 587 | TGTATGGGATCAGGCTTCCACTTTGGAA (SEQ ID | RTT |
| | NO: 587) | |
| 588 | CTGTATGGGATCAGGCTTCCACATTGGAA (SEQ | RTT (CAAAGT-to-CAATGT PAM silencing |
| | ID NO: 588) | edit) |
| 589 | CTGTATGGGATCAGGCTTCCACGTTGGAA (SEQ | RTT (CAAAGT-to-CAACGT PAM silencing |
| | ID NO: 589) | edit) |
| 590 | CTGTATGGGATCAGGCTTCCACTTTGGAA (SEQ | RTT |
| | ID NO: 590) | |
| 591 | TCTGTATGGGATCAGGCTTCCACATTGGAA (SEQ | RTT (CAAAGT-to-CAATGT PAM silencing |
| | ID NO: 591) | edit) |
| 592 | TCTGTATGGGATCAGGCTTCCACGTTGGAA (SEQ | RTT (CAAAGT-to-CAACGT PAM silencing |
| | ID NO: 592) | edit) |
| 593 | TCTGTATGGGATCAGGCTTCCACTTTGGAA (SEQ | RTT |
| | ID NO: 593) | |
| 594 | TTCTGTATGGGATCAGGCTTCCACATTGGAA | RTT (CAAAGT-to-CAATGT PAM silencing |
| | (SEQ ID NO: 594) | edit) |
| 595 | TTCTGTATGGGATCAGGCTTCCACGTTGGAA | RTT (CAAAGT-to-CAACGT PAM silencing |
| | (SEQ ID NO: 595) | edit) |
| 596 | TTCTGTATGGGATCAGGCTTCCACTTTGGAA | RTT |
| | (SEQ ID NO: 596) | |
| 597 | TTTCTGTATGGGATCAGGCTTCCACATTGGAA | RTT (CAAAGT-to-CAATGT PAM silencing |
| | (SEQ ID NO: 597) | edit) |
| 598 | TTTCTGTATGGGATCAGGCTTCCACGTTGGAA | RTT (CAAAGT-to-CAACGT PAM silencing |
| | (SEQ ID NO: 598) | edit) |
| 599 | TTTCTGTATGGGATCAGGCTTCCACTTTGGAA | RTT |
| | (SEQ ID NO: 599) | |
| 600 | CTTTCTGTATGGGATCAGGCTTCCACATTGGAA | RTT (CAAAGT-to-CAATGT PAM silencing |
| | (SEQ ID NO: 600) | edit) |
| 601 | CTTTCTGTATGGGATCAGGCTTCCACGTTGGAA | RTT (CAAAGT-to-CAACGT PAM silencing |
| | (SEQ ID NO: 601) | edit) |
| 602 | CTTTCTGTATGGGATCAGGCTTCCACTTTGGAA | RTT |
| | (SEQ ID NO: 602) | |
| 603 | GCTTTCTGTATGGGATCAGGCTTCCACATTGGAA | RTT (CAAAGT-to-CAATGT PAM silencing |
| | (SEQ ID NO: 603) | edit) |
| 604 | GCTTTCTGTATGGGATCAGGCTTCCACGTTGGAA | RTT (CAAAGT-to-CAACGT PAM silencing |
| | (SEQ ID NO: 604) | edit) |
| 605 | GCTTTCTGTATGGGATCAGGCTTCCACTTTGGAA | RTT |
| | (SEQ ID NO: 605) | |
| 606 | AGCTTTCTGTATGGGATCAGGCTTCCACATTGGA | RTT (CAAAGT-to-CAATGT PAM silencing |
| | A (SEQ ID NO: 606) | edit) |
| 607 | AGCTTTCTGTATGGGATCAGGCTTCCACGTTGGA | RTT (CAAAGT-to-CAACGT PAM silencing |
| | A (SEQ ID NO: 607) | edit) |
| 608 | AGCTTTCTGTATGGGATCAGGCTTCCACTTTGGA | RTT |
| | A (SEQ ID NO: 608) | |
| 609 | AAGCTTTCTGTATGGGATCAGGCTTCCACATTGG | RTT (CAAAGT-to-CAATGT PAM silencing |
| | AA (SEQ ID NO: 609) | edit) |
| 610 | AAGCTTTCTGTATGGGATCAGGCTTCCACGTTGG | RTT (CAAAGT-to-CAACGT PAM silencing |
| | AA (SEQ ID NO: 610) | edit) |
| 611 | AAGCTTTCTGTATGGGATCAGGCTTCCACTTTGG | RTT |
| | AA (SEQ ID NO: 611) | |
| 612 | GAAGCTTTCTGTATGGGATCAGGCTTCCACATTG | RTT (CAAAGT-to-CAATGT PAM silencing |
| | GAA (SEQ ID NO: 612) | edit) |
| 613 | GAAGCTTTCTGTATGGGATCAGGCTTCCACGTTG | RTT (CAAAGT-to-CAACGT PAM silencing |
| | GAA (SEQ ID NO: 613) | edit) |
| 614 | GAAGCTTTCTGTATGGGATCAGGCTTCCACTTTG | RTT |
| | GAA (SEQ ID NO: 614) | |
| 615 | AGAAGCTTTCTGTATGGGATCAGGCTTCCACATT | RTT (CAAAGT-to-CAATGT PAM silencing |
| | GGAA (SEQ ID NO: 615) | edit) |
| 616 | AGAAGCTTTCTGTATGGGATCAGGCTTCCACGTT | RTT (CAAAGT-to-CAACGT PAM silencing |
| | GGAA (SEQ ID NO: 616) | edit) |
| 617 | AGAAGCTTTCTGTATGGGATCAGGCTTCCACTTT | RTT |
| | GGAA (SEQ ID NO: 617) | |
| 618 | CAGAAGCTTTCTGTATGGGATCAGGCTTCCACAT | RTT (CAAAGT-to-CAATGT PAM silencing |
| | TGGAA (SEQ ID NO: 618) | edit) |
| 619 | CAGAAGCTTTCTGTATGGGATCAGGCTTCCACGT | RTT (CAAAGT-to-CAACGT PAM silencing |
| | TGGAA (SEQ ID NO: 619) | edit) |
| 620 | CAGAAGCTTTCTGTATGGGATCAGGCTTCCACTT | RTT |
| | TGGAA (SEQ ID NO: 620) | |
| 621 | GCAGAAGCTTTCTGTATGGGATCAGGCTTCCACA | RTT (CAAAGT-to-CAATGT PAM silencing |
| | TTGGAA (SEQ ID NO: 621) | edit) |
| 622 | GCAGAAGCTTTCTGTATGGGATCAGGCTTCCACG | RTT (CAAAGT-to-CAACGT PAM silencing |
| | TTGGAA (SEQ ID NO: 622) | edit) |
| 623 | GCAGAAGCTTTCTGTATGGGATCAGGCTTCCACT | RTT |
| | TTGGAA (SEQ ID NO: 623) | |
| 25 | AAGATTCAGTAGATCTTTCT (SEQ ID NO: 25) | PE3 ngRNA spacer (TGTGAT PAM) |
| 128 | AGTAGATCTTTCTTGTGATT (SEQ ID NO: 128) | PE3 ngRNA spacer (ATCAGT PAM) |
| 129 | CATCACCTTTTCGCTTTTTC (SEQ ID NO: 129) | PE3 ngRNA spacer (CAAGAT PAM) |
| 130 | CCAAGATGGCTCAAGATTCA (SEQ ID NO: 130) | PE3 ngRNA spacer (GTAGAT PAM) |
| 131 | CTTTCTTGTGATTATCAGTT (SEQ ID NO: 131) | PE3 ngRNA spacer (TTGGAT PAM) |
| 133 | TCGCTTTTTCCAAGATGGCT (SEQ ID NO: 133) | PE3 ngRNA spacer (CAAGAT PAM) |
| 134 | TGGATGCAGAAGCTTTCTGT (SEQ ID NO: 134) | PE3 ngRNA spacer (ATGGAT PAM) |
| 135 | TTTTCCAAGATGGCTCAAGA (SEQ ID NO: 135) | PE3 ngRNA spacer (TTCAGT PAM) |

TABLE 9

| Sequence | | |
|---|---|---|
| Number | Sequence | Description |
| 624 | CGTGAAGACAGGTGTCT (SEQ ID NO: 624) | PEgRNA spacer (TG PAM) |
| 625 | ACGTGAAGACAGGTGTCT (SEQ ID NO: 625) | PEgRNA spacer (TG PAM) |
| 626 | CACGTGAAGACAGGTGTCT (SEQ ID NO: 626) | PEgRNA spacer (TG PAM) |
| 201 | CCACGTGAAGACAGGTGTCT (SEQ ID NO: 201) | PEgRNA spacer (TG PAM) |
| 627 | GCCACGTGAAGACAGGTGTCT (SEQ ID NO: 627) | PEgRNA spacer (TG PAM) |
| 628 | AGCCACGTGAAGACAGGTGTCT (SEQ ID NO: 628) | PEgRNA spacer (TG PAM) |
| 629 | CACCT | PBS |
| 630 | CACCTG | PBS |
| 631 | CACCTGT | PBS |
| 632 | CACCTGTC | PBS |
| 633 | CACCTGTCT | PBS |
| 634 | CACCTGTCTT (SEQ ID NO: 634) | PBS |
| 635 | CACCTGTCTTC (SEQ ID NO: 635) | PBS |
| 636 | CACCTGTCTTCA (SEQ ID NO: 636) | PBS |
| 637 | CACCTGTCTTCAC (SEQ ID NO: 637) | PBS |
| 638 | CACCTGTCTTCACG (SEQ ID NO: 638) | PBS |
| 639 | CACCTGTCTTCACGT (SEQ ID NO: 639) | PBS |
| 640 | CACCTGTCTTCACGTG (SEQ ID NO: 640) | PBS |
| 641 | CACCTGTCTTCACGTGG (SEQ ID NO: 641) | PBS |
| 642 | CACCTGTCTTCACGTGGC (SEQ ID NO: 642) | PBS |
| 643 | CACCTGTCTTCACGTGGCT (SEQ ID NO: 643) | PBS |
| 644 | GATCAGGCTTCCACTTTGGAAACCCAGCAAGA | RTT |
| | (SEQ ID NO: 644) | |
| 645 | GGATCAGGCTTCCACTTTGGAAACCCAGCAAGA | RTT |
| | (SEQ ID NO: 645) | |
| 646 | GGGATCAGGCTTCCACTTTGGAAACCCAGCAAG | RTT |
| | A (SEQ ID NO: 646) | |
| 647 | TGGGATCAGGCTTCCACTTTGGAAACCCAGCAA | RTT |
| | GA (SEQ ID NO: 647) | |
| 648 | ATGGGATCAGGCTTCCACTTTGGAAACCCAGCA | RTT |
| | AGA (SEQ ID NO: 648) | |
| 649 | TATGGGATCAGGCTTCCACTTTGGAAACCCAGCA | RTT |
| | AGA (SEQ ID NO: 649) | |
| 650 | GTATGGGATCAGGCTTCCACTTTGGAAACCCAGC | RTT |
| | AAGA (SEQ ID NO: 650) | |
| 651 | TGTATGGGATCAGGCTTCCACTTTGGAAACCCAG | RTT |
| | CAAGA (SEQ ID NO: 651) | |
| 652 | CTGTATGGGATCAGGCTTCCACTTTGGAAACCCA | RTT |
| | GCAAGA (SEQ ID NO: 652) | |
| 24 | AAGATGGCTCAAGATTCAGT (SEQ ID NO: 24) | PE3 ngRNA spacer (AG PAM) |
| 25 | AAGATTCAGTAGATCTTTCT (SEQ ID NO: 25) | PE3 ngRNA spacer (TG PAM) |
| 26 | AAGCTTTCTGTATGGGATCA (SEQ ID NO: 26) | PE3b ngRNA spacer (GG PAM) |
| 27 | AGATCTTTCTTGTGATTATC (SEQ ID NO: 27) | PE3 ngRNA spacer (AG PAM) |
| 28 | ATGGGATCAGGCTTCCACTT (SEQ ID NO: 28) | PE3b ngRNA spacer (TG PAM) |
| 29 | CCTTTTCGCTTTTTCCAAGA (SEQ ID NO: 29) | PE3 ngRNA spacer (TG PAM) |
| 30 | CTTTTCGCTTTTTCCAAGAT (SEQ ID NO: 30) | PE3 ngRNA spacer (GG PAM) |
| 31 | GAAGCTTTCTGTATGGGATC (SEQ ID NO: 31) | PE3b ngRNA spacer (AG PAM) |
| 32 | GATGCAGAAGCTTTCTGTAT (SEQ ID NO: 32) | PE3 ngRNA spacer (GG PAM) |
| 33 | GATTCAGTAGATCTTTCTTG (SEQ ID NO: 33) | PE3 ngRNA spacer (TG PAM) |
| 34 | GCTTTTTCCAAGATGGCTCA (SEQ ID NO: 34) | PE3 ngRNA spacer (AG PAM) |
| 35 | GGATGCAGAAGCTTTCTGTA (SEQ ID NO: 35) | PE3 ngRNA spacer (TG PAM) |
| 36 | GGCTTCCACTTTGGAAACCC (SEQ ID NO: 36) | PE3 ngRNA spacer (AG PAM) |
| 37 | GTGAAGGGACATCACCTTTT (SEQ ID NO: 37) | PE3 ngRNA spacer (CG PAM) |
| 38 | TCACCTTTTCGCTTTTTCCA (SEQ ID NO: 38) | PE3 ngRNA spacer (AG PAM) |
| 39 | TCCAAGATGGCTCAAGATTC (SEQ ID NO: 39) | PE3 ngRNA spacer (AG PAM) |
| 40 | TCCACTTTGGAAACCCAGCA (SEQ ID NO: 40) | PE3 ngRNA spacer (AG PAM) |
| 41 | TGATTATCAGTTTTGGATGC (SEQ ID NO: 41) | PE3 ngRNA spacer (AG PAM) |
| 43 | TGGGATCAGGCTTCCACTTT (SEQ ID NO: 43) | PE3b ngRNA spacer (GG PAM) |
| 44 | TTATCAGTTTTGGATGCAGA (SEQ ID NO: 44) | PE3 ngRNA spacer (AG PAM) |
| 45 | TTCTTGTGATTATCAGTTTT (SEQ ID NO: 45) | PE3 ngRNA spacer (GG PAM) |
| 46 | TTGTGATTATCAGTTTTGGA (SEQ ID NO: 46) | PE3 ngRNA spacer (TG PAM) |
| 47 | TTTCTTGTGATTATCAGTTT (SEQ ID NO: 47) | PE3 ngRNA spacer (TG PAM) |
| 48 | TTTTGGATGCAGAAGCTTTC (SEQ ID NO: 48) | PE3 ngRNA spacer (TG PAM) |
| 49 | TTTCTTGTGATTATCAGTTTGTTTTAGAGCTAGAA | PE3 ngRNA (TG PAM) |
| | ATAGCAAGTTAAAATAAGGCTAGTCCGTTATCAA | |
| | CTTGAAAAAGTGGCACCGAGTCGGTGC (SEQ ID | |
| | NO: 49) | |
| 50 | GGATGCAGAAGCTTTCTGTAGTTTTAGAGCTAGA | PE3 ngRNA (TG PAM) |
| | AATAGCAAGTTAAAATAAGGCTAGTCCGTTATCA | |
| | ACTTGAAAAAGTGGCACCGAGTCGGTGC (SEQ ID | |
| | NO: 50) | |
| 51 | GAAGCTTTCTGTATGGGATCGTTTTAGAGCTAGA | PE3b ngRNA (AG PAM) |
| | AATAGCAAGTTAAAATAAGGCTAGTCCGTTATCA | |
| | ACTTGAAAAAGTGGCACCGAGTCGGTGC (SEQ ID | |
| | NO: 51) | |
| 52 | ATGGGATCAGGCTTCCACTTGTTTTAGAGCTAGA | PE3b ngRNA (TG PAM) |
| | AATAGCAAGTTAAAATAAGGCTAGTCCGTTATCA | |
| | ACTTGAAAAAGTGGCACCGAGTCGGTGC (SEQ ID | |
| | NO: 52) | |
| 53 | GGATGCAGAAGCTTTCTGTAGTTTTAGAGCTAGA | PE3 ngRNA (TG PAM), contains end |
| | AATAGCAAGTTAAAATAAGGCTAGTCCGTTATCA | adaptations |
| | ACTTGAAAAAGTGGCACCGAGTCGGTGCTTTT | |
| | (SEQ ID NO: 53) | |
| 54 | GAAGCTTTCTGTATGGGATCGTTTTAGAGCTAGA | PE3b ngRNA (AG PAM), contains end |
| | AATAGCAAGTTAAAATAAGGCTAGTCCGTTATCA | adaptations |
| | ACTTGAAAAAGTGGCACCGAGTCGGTGCTTTT | |
| | (SEQ ID NO: 54) | |
| 55 | GTTTCTTGTGATTATCAGTTTGTTTTAGAGCTAGA | PE3 ngRNA (TG PAM), contains end |
| | AATAGCAAGTTAAAATAAGGCTAGTCCGTTATCA | adaptations |
| | ACTTGAAAAAGTGGCACCGAGTCGGTGCTTTT | |
| | (SEQ ID NO: 55) | |
| 56 | GATGGGATCAGGCTTCCACTTGTTTTAGAGCTAG | PE3b ngRNA (TG PAM), contains end |
| | AAATAGCAAGTTAAAATAAGGCTAGTCCGTTATC | adaptations |
| | AACTTGAAAAAGTGGCACCGAGTCGGTGCTTTT | |
| | (SEQ ID NO: 56) | |
| 57 | GGATGCAGAAGCTTTCTGTAGTTTTAGAGCTAGA | PE3 ngRNA (TG PAM), contains linker |
| | AATAGCAAGTTAAAATAAGGCTAGTCCGTTATCA | sequence AACATTGA; hairpin SEQ ID |
| | ACTTGAAAAAGTGGCACCGAGTCGGTGCAACAT | NO: 3591; end adaptations |
| | TGACGCGTCTCTACGTGGGGGCGCGTTTT (SEQ | |
| | ID NO: 57) | |
| 58 | GAAGCTTTCTGTATGGGATCGTTTTAGAGCTAGA | PE3b ngRNA (AG PAM), contains linker |
| | AATAGCAAGTTAAAATAAGGCTAGTCCGTTATCA | sequence AACATTGA; hairpin SEQ ID |
| | ACTTGAAAAAGTGGCACCGAGTCGGTGCAACAT | NO: 3591; end adaptations |
| | TGACGCGTCTCTACGTGGGGGCGCGTTTT (SEQ | |
| | ID NO: 58) | |
| 59 | GTTTCTTGTGATTATCAGTTTGTTTTAGAGCTAGA | PE3 ngRNA (TG PAM), contains linker |
| | AATAGCAAGTTAAAATAAGGCTAGTCCGTTATCA | sequence AACATTGA; hairpin SEQ ID |
| | ACTTGAAAAAGTGGCACCGAGTCGGTGCAACAT | NO: 3591; end adaptations |
| | TGACGCGTCTCTACGTGGGGGCGCGTTTT (SEQ | |
| | ID NO: 59) | |
| 60 | GATGGGATCAGGCTTCCACTTGTTTTAGAGCTAG | PE3b ngRNA (TG PAM), contains linker |
| | AAATAGCAAGTTAAAATAAGGCTAGTCCGTTATC | sequence AACATTGA; hairpin SEQ ID |
| | AACTTGAAAAAGTGGCACCGAGTCGGTGCAACA | NO: 3591; end adaptations |
| | TTGACGCGTCTCTACGTGGGGGCGCGTTTT (SEQ | |
| | ID NO: 60) | |

TABLE 10

| Sequence | | |
|---|---|---|
| Number | Sequence | Description |
| 653 | GAAGACAGGTGTCTTGC (SEQ ID NO: 653) | PEgRNA spacer (TG; TGG; TGGG PAM) |
| 654 | TGAAGACAGGTGTCTTGC (SEQ ID NO: 654) | PEgRNA spacer (TG; TGG; TGGG PAM) |
| 655 | GTGAAGACAGGTGTCTTGC (SEQ ID NO: 655) | PEgRNA spacer (TG; TGG; TGGG PAM) |
| 203 | CGTGAAGACAGGTGTCTTGC (SEQ ID NO: 203) | PEgRNA spacer (TG; TGG; TGGG PAM) |
| 656 | ACGTGAAGACAGGTGTCTTGC (SEQ ID NO: 656) | PEgRNA spacer (TG; TGG; TGGG PAM) |
| 657 | CACGTGAAGACAGGTGTCTTGC (SEQ ID NO: 657) | PEgRNA spacer (TG; TGG; TGGG PAM) |
| 658 | AGACA | PBS |
| 659 | AGACAC | PBS |
| 660 | AGACACC | PBS |
| 661 | AGACACCT | PBS |
| 662 | AGACACCTG | PBS |
| 663 | AGACACCTGT (SEQ ID NO: 663) | PBS |
| 664 | AGACACCTGTC (SEQ ID NO: 664) | PBS |
| 665 | AGACACCTGTCT (SEQ ID NO: 665) | PBS |
| 666 | AGACACCTGTCTT (SEQ ID NO: 666) | PBS |
| 667 | AGACACCTGTCTTC (SEQ ID NO: 667) | PBS |
| 668 | AGACACCTGTCTTCA (SEQ ID NO: 668) | PBS |
| 669 | AGACACCTGTCTTCAC (SEQ ID NO: 669) | PBS |
| 670 | AGACACCTGTCTTCACG (SEQ ID NO: 670) | PBS |
| 671 | AGACACCTGTCTTCACGT (SEQ ID NO: 671) | PBS |
| 672 | AGACACCTGTCTTCACGTG (SEQ ID NO: 672) | PBS |
| 673 | GATCAGGCTTCCACTTTGGAAACACAGCA (SEQ | RTT*2, 3, 4, 5 (TGG-to-TGT; TGGG-to-TGTG |
| | ID NO: 673) | PAM silencing edit) |
| 674 | GATCAGGCTTCCACTTTGGAAACCCAGCA (SEQ | RTT*1, 2, 3, 4, 5, 6 |
| | ID NO: 674) | |
| 675 | GATCAGGCTTCCACTTTGGAAACGCAGCA (SEQ | RTT*2, 3, 4, 5 (TGG-to-TGC; TGGG-to-TGCG |
| | ID NO: 675) | PAM silencing edit) |
| 676 | GATCAGGCTTCCACTTTGGAAACTCAGCA (SEQ | RTT*2, 3, 4, 5 (TGG-to-TGA; TGGG-to-TGAG |
| | ID NO: 676) | PAM silencing edit) |
| 677 | GGATCAGGCTTCCACTTTGGAAACACAGCA (SEQ | RTT*2, 3, 4, 5 (TGG-to-TGT; TGGG-to-TGTG |
| | ID NO: 677) | PAM silencing edit) |
| 678 | GGATCAGGCTTCCACTTTGGAAACCCAGCA (SEQ | RTT*1, 2, 3, 4, 5, 6 |
| | ID NO: 678) | |
| 679 | GGATCAGGCTTCCACTTTGGAAACGCAGCA (SEQ | RTT*2, 3, 4, 5 (TGG-to-TGC; TGGG-to-TGCG |
| | ID NO: 679) | PAM silencing edit) |
| 680 | GGATCAGGCTTCCACTTTGGAAACTCAGCA (SEQ | RTT*2, 3, 4, 5 (TGG-to-TGA; TGGG-to-TGAG |
| | ID NO: 680) | PAM silencing edit) |
| 681 | GGGATCAGGCTTCCACTTTGGAAACACAGCA | RTT*2, 3, 4, 5 (TGG-to-TGT; TGGG-to-TGTG |
| | (SEQ ID NO: 681) | PAM silencing edit) |
| 682 | GGGATCAGGCTTCCACTTTGGAAACCCAGCA | RTT*1, 2, 3, 4, 5, 6 |
| | (SEQ ID NO: 682) | |
| 683 | GGGATCAGGCTTCCACTTTGGAAACGCAGCA | RTT*2, 3, 4, 5 (TGG-to-TGC; TGGG-to-TGCG |
| | (SEQ ID NO: 683) | PAM silencing edit) |
| 684 | GGGATCAGGCTTCCACTTTGGAAACTCAGCA | RTT*2, 3, 4, 5 (TGG-to-TGA; TGGG-to-TGAG |
| | (SEQ ID NO: 684) | PAM silencing edit) |
| 685 | TGGGATCAGGCTTCCACTTTGGAAACACAGCA | RTT*2, 3, 4, 5 (TGG-to-TGT; TGGG-to-TGTG |
| | (SEQ ID NO: 685) | PAM silencing edit) |
| 686 | TGGGATCAGGCTTCCACTTTGGAAACCCAGCA | RTT*1, 2, 3, 4, 5, 6 |
| | (SEQ ID NO: 686) | |
| 687 | TGGGATCAGGCTTCCACTTTGGAAACGCAGCA | RTT*2, 3, 4, 5 (TGG-to-TGC; TGGG-to-TGCG |
| | (SEQ ID NO: 687) | PAM silencing edit) |
| 688 | TGGGATCAGGCTTCCACTTTGGAAACTCAGCA | RTT*2, 3, 4, 5 (TGG-to-TGA; TGGG-to-TGAG |
| | (SEQ ID NO: 688) | PAM silencing edit) |
| 689 | ATGGGATCAGGCTTCCACTTTGGAAACACAGCA | RTT*2, 3, 4, 5 (TGG-to-TGT; TGGG-to-TGTG |
| | (SEQ ID NO: 689) | PAM silencing edit) |
| 690 | ATGGGATCAGGCTTCCACTTTGGAAACCCAGCA | RTT*1, 2, 3, 4, 5, 6 |
| | (SEQ ID NO: 690) | |
| 691 | ATGGGATCAGGCTTCCACTTTGGAAACGCAGCA | RTT*2, 3, 4, 5 (TGG-to-TGC; TGGG-to-TGCG |
| | (SEQ ID NO: 691) | PAM silencing edit) |
| 692 | ATGGGATCAGGCTTCCACTTTGGAAACTCAGCA | RTT*2, 3, 4, 5 (TGG-to-TGA; TGGG-to-TGAG |
| | (SEQ ID NO: 692) | PAM silencing edit) |
| 693 | TATGGGATCAGGCTTCCACTTTGGAAACACAGCA | RTT*2, 3, 4, 5 (TGG-to-TGT; TGGG-to-TGTG |
| | (SEQ ID NO: 693) | PAM silencing edit) |
| 694 | TATGGGATCAGGCTTCCACTTTGGAAACCCAGCA | RTT*1, 2, 3, 4, 5, 6 |
| | (SEQ ID NO: 694) | |
| 695 | TATGGGATCAGGCTTCCACTTTGGAAACGCAGCA | RTT*2, 3, 4, 5 (TGG-to-TGC; TGGG-to-TGCG |
| | (SEQ ID NO: 695) | PAM silencing edit) |
| 696 | TATGGGATCAGGCTTCCACTTTGGAAACTCAGCA | RTT*2, 3, 4, 5 (TGG-to-TGA; TGGG-to-TGAG |
| | (SEQ ID NO: 696) | PAM silencing edit) |
| 697 | GTATGGGATCAGGCTTCCACTTTGGAAACACAGC | RTT*2, 3, 4, 5 (TGG-to-TGT; TGGG-to-TGTG |
| | A (SEQ ID NO: 697) | PAM silencing edit) |
| 698 | GTATGGGATCAGGCTTCCACTTTGGAAACCCAGC | RTT*1, 2, 3, 4, 5, 6 |
| | A (SEQ ID NO: 698) | |
| 699 | GTATGGGATCAGGCTTCCACTTTGGAAACGCAGC | RTT*2, 3, 4, 5 (TGG-to-TGC; TGGG-to-TGCG |
| | A (SEQ ID NO: 699) | PAM silencing edit) |
| 700 | GTATGGGATCAGGCTTCCACTTTGGAAACTCAGC | RTT*2, 3, 4, 5 (TGG-to-TGA; TGGG-to-TGAG |
| | A (SEQ ID NO: 700) | PAM silencing edit) |
| 701 | TGTATGGGATCAGGCTTCCACTTTGGAAACACAG | RTT*2, 3, 4, 5 (TGG-to-TGT; TGGG-to-TGTG |
| | CA (SEQ ID NO: 701) | PAM silencing edit) |
| 702 | TGTATGGGATCAGGCTTCCACTTTGGAAACCCAG | RTT*1, 2, 3, 4, 5, 6 |
| | CA (SEQ ID NO: 702) | |
| 703 | TGTATGGGATCAGGCTTCCACTTTGGAAACGCAG | RTT*2, 3, 4, 5 (TGG-to-TGC; TGGG-to-TGCG |
| | CA (SEQ ID NO: 703) | PAM silencing edit) |
| 704 | TGTATGGGATCAGGCTTCCACTTTGGAAACTCAG | RTT*2, 3, 4, 5 (TGG-to-TGA; TGGG-to-TGAG |
| | CA (SEQ ID NO: 704) | PAM silencing edit) |
| 705 | CTGTATGGGATCAGGCTTCCACTTTGGAAACACA | RTT*2, 3, 4, 5 (TGG-to-TGT; TGGG-to-TGTG |
| | GCA (SEQ ID NO: 705) | PAM silencing edit) |
| 706 | CTGTATGGGATCAGGCTTCCACTTTGGAAACCCA | RTT*1, 2, 3, 4, 5, 6 |
| | GCA (SEQ ID NO: 706) | |
| 707 | CTGTATGGGATCAGGCTTCCACTTTGGAAACGCA | RTT*2, 3, 4, 5 (TGG-to-TGC; TGGG-to-TGCG |
| | GCA (SEQ ID NO: 707) | PAM silencing edit) |
| 708 | CTGTATGGGATCAGGCTTCCACTTTGGAAACTCA | RTT*2, 3, 4, 5 (TGG-to-TGA; TGGG-to-TGAG |
| | GCA (SEQ ID NO: 708) | PAM silencing edit) |
| 709 | TCTGTATGGGATCAGGCTTCCACTTTGGAAACAC | RTT*2, 3, 4, 5 (TGG-to-TGT; TGGG-to-TGTG |
| | AGCA (SEQ ID NO: 709) | PAM silencing edit) |
| 710 | TCTGTATGGGATCAGGCTTCCACTTTGGAAACCC | RTT*1, 2, 3, 4, 5, 6 |
| | AGCA (SEQ ID NO: 710) | |
| 711 | TCTGTATGGGATCAGGCTTCCACTTTGGAAACGC | RTT*2, 3, 4, 5 (TGG-to-TGC; TGGG-to-TGCG |
| | AGCA (SEQ ID NO: 711) | PAM silencing edit) |
| 712 | TCTGTATGGGATCAGGCTTCCACTTTGGAAACTC | RTT*2, 3, 4, 5 (TGG-to-TGA; TGGG-to-TGAG |
| | AGCA (SEQ ID NO: 712) | PAM silencing edit) |
| 713 | TTCTGTATGGGATCAGGCTTCCACTTTGGAAACA | RTT*2, 3, 4, 5 (TGG-to-TGT; TGGG-to-TGTG |
| | CAGCA (SEQ ID NO: 713) | PAM silencing edit) |
| 714 | TTCTGTATGGGATCAGGCTTCCACTTTGGAAACC | RTT*1, 2, 3, 4, 5, 6 |
| | CAGCA (SEQ ID NO: 714) | |
| 715 | TTCTGTATGGGATCAGGCTTCCACTTTGGAAACG | RTT*2, 3, 4, 5 (TGG-to-TGC; TGGG-to-TGCG |
| | CAGCA (SEQ ID NO: 715) | PAM silencing edit) |
| 716 | TTCTGTATGGGATCAGGCTTCCACTTTGGAAACT | RTT*2, 3, 4, 5 (TGG-to-TGA; TGGG-to-TGAG |
| | CAGCA (SEQ ID NO: 716) | PAM silencing edit) |
| 717 | TTTCTGTATGGGATCAGGCTTCCACTTTGGAAAC | RTT*2, 3, 4, 5 (TGG-to-TGT; TGGG-to-TGTG |
| | ACAGCA (SEQ ID NO: 717) | PAM silencing edit) |
| 718 | TTTCTGTATGGGATCAGGCTTCCACTTTGGAAAC | RTT*1, 2, 3, 4, 5, 6 |
| | CCAGCA (SEQ ID NO: 718) | |
| 719 | TTTCTGTATGGGATCAGGCTTCCACTTTGGAAAC | RTT*2, 3, 4, 5 (TGG-to-TGC; TGGG-to-TGCG |
| | GCAGCA (SEQ ID NO: 719) | PAM silencing edit) |
| 720 | TTTCTGTATGGGATCAGGCTTCCACTTTGGAAAC | RTT*2, 3, 4, 5 (TGG-to-TGA; TGGG-to-TGAG |
| | TCAGCA (SEQ ID NO: 720) | PAM silencing edit) |
| 24 | AAGATGGCTCAAGATTCAGT (SEQ ID NO: 24) | PE3 ngRNA spacer (AG PAM) |
| 25 | AAGATTCAGTAGATCTTTCT (SEQ ID NO: 25) | PE3 ngRNA spacer (TG PAM) |
| 26 | AAGCTTTCTGTATGGGATCA (SEQ ID NO: 26) | PE3b*1 ngRNA spacer (GG PAM) |
| 126 | ACCTTTTCGCTTTTTCCAAG (SEQ ID NO: 126) | PE3 ngRNA spacer (ATGG PAM) |
| 127 | AGAAGCTTTCTGTATGGGAT (SEQ ID NO: 127) | PE3b*2 ngRNA spacer (CAGG PAM) |
| 27 | AGATCTTTCTTGTGATTATC (SEQ ID NO: 27) | PE3 ngRNA spacer (AG PAM) |
| 28 | ATGGGATCAGGCTTCCACTT (SEQ ID NO: 28) | PE3b*3 ngRNA spacer (TG; TGG PAM) |
| 29 | CCTTTTCGCTTTTTCCAAGA (SEQ ID NO: 29) | PE3 ngRNA spacer (TG; TGG PAM) |
| 131 | CTTTCTTGTGATTATCAGTT (SEQ ID NO: 131) | PE3 ngRNA spacer (TTGG PAM) |
| 30 | CTTTTCGCTTTTTCCAAGAT (SEQ ID NO: 30) | PE3 ngRNA spacer (GG PAM) |
| 31 | GAAGCTTTCTGTATGGGATC (SEQ ID NO: 31) | PE3b*4 ngRNA spacer (AG; AGG PAM) |
| 32 | GATGCAGAAGCTTTCTGTAT (SEQ ID NO: 32) | PE3 ngRNA spacer (GG PAM) |
| 33 | GATTCAGTAGATCTTTCTTG (SEQ ID NO: 33) | PE3 ngRNA spacer (TG PAM) |
| 34 | GCTTTTTCCAAGATGGCTCA (SEQ ID NO: 34) | PE3 ngRNA spacer (AG PAM) |
| 35 | GGATGCAGAAGCTTTCTGTA (SEQ ID NO: 35) | PE3 ngRNA spacer (TG; TGG PAM) |
| 36 | GGCTTCCACTTTGGAAACCC (SEQ ID NO: 36) | PE3 ngRNA spacer (AG PAM) |
| 37 | GTGAAGGGACATCACCTTTT (SEQ ID NO: 37) | PE3 ngRNA spacer (CG PAM) |
| 132 | TATGGGATCAGGCTTCCACT (SEQ ID NO: 132) | PE3b*5 ngRNA spacer (TTGG PAM) |
| 38 | TCACCTTTTCGCTTTTTCCA (SEQ ID NO: 38) | PE3 ngRNA spacer (AG PAM) |
| 39 | TCCAAGATGGCTCAAGATTC (SEQ ID NO: 39) | PE3 ngRNA spacer (AG PAM) |
| 40 | TCCACTTTGGAAACCCAGCA (SEQ ID NO: 40) | PE3 ngRNA spacer (AG PAM) |
| 41 | TGATTATCAGTTTTGGATGC (SEQ ID NO: 41) | PE3 ngRNA spacer (AG PAM) |
| 134 | TGGATGCAGAAGCTTTCTGT (SEQ ID NO: 134) | PE3 ngRNA spacer (ATGG PAM) |
| 43 | TGGGATCAGGCTTCCACTTT (SEQ ID NO: 43) | PE3b*6 ngRNA spacer (GG PAM) |
| 44 | TTATCAGTTTTGGATGCAGA (SEQ ID NO: 44) | PE3 ngRNA spacer (AG PAM) |
| 45 | TTCTTGTGATTATCAGTTTT (SEQ ID NO: 45) | PE3 ngRNA spacer (GG PAM) |
| 46 | TTGTGATTATCAGTTTTGGA (SEQ ID NO: 46) | PE3 ngRNA spacer (TG PAM) |
| 47 | TTTCTTGTGATTATCAGTTT (SEQ ID NO: 47) | PE3 ngRNA spacer (TG; TGG PAM) |
| 48 | TTTTGGATGCAGAAGCTTTC (SEQ ID NO: 48) | PE3 ngRNA spacer (TG PAM) |
| 721 | CGTGAAGACAGGTGTCTTGCGTTTTAGAGCTAGA | pegRNA*1, 2, 3, 4, 5, 6 |
| | AATAGCAAGTTAAAATAAGGCTAGTCCGTTATCA | |
| | ACTTGAAAAAGTGGCACCGAGTCGGTGCATGGG | |
| | ATCAGGCTTCCACTTTGGAAACCCAGCAAGACA | |
| | CCT (SEQ ID NO: 721) | |
| 722 | CGTGAAGACAGGTGTCTTGCGTTTTAGAGCTAGA | pegRNA*1, 2, 3, 4, 5, 6 |
| | AATAGCAAGTTAAAATAAGGCTAGTCCGTTATCA | |
| | ACTTGAAAAAGTGGCACCGAGTCGGTGCATGGG | |
| | ATCAGGCTTCCACTTTGGAAACCCAGCAAGACA | |
| | CCTGT (SEQ ID NO: 722) | |
| 723 | CGTGAAGACAGGTGTCTTGCGTTTTAGAGCTAGA | pegRNA*1, 2, 3, 4, 5, 6 |
| | AATAGCAAGTTAAAATAAGGCTAGTCCGTTATCA | |
| | ACTTGAAAAAGTGGCACCGAGTCGGTGCGTATG | |
| | GGATCAGGCTTCCACTTTGGAAACCCAGCAAGA | |
| | CACCT (SEQ ID NO: 723) | |
| 724 | CGTGAAGACAGGTGTCTTGCGTTTTAGAGCTAGA | pegRNA*1, 2, 3, 4, 5, 6 |
| | AATAGCAAGTTAAAATAAGGCTAGTCCGTTATCA | |
| | ACTTGAAAAAGTGGCACCGAGTCGGTGCATGGG | |
| | ATCAGGCTTCCACTTTGGAAACCCAGCAAGACA | |
| | CCTGTCT (SEQ ID NO: 724) | |
| 725 | CGTGAAGACAGGTGTCTTGCGTTTTAGAGCTAGA | pegRNA*1, 2, 3, 4, 5, 6 |
| | AATAGCAAGTTAAAATAAGGCTAGTCCGTTATCA | |
| | ACTTGAAAAAGTGGCACCGAGTCGGTGCGTATG | |
| | GGATCAGGCTTCCACTTTGGAAACCCAGCAAGA | |
| | CACCTGT (SEQ ID NO: 725) | |
| 726 | CGTGAAGACAGGTGTCTTGCGTTTTAGAGCTAGA | pegRNA*1, 2, 3, 4, 5, 6 |
| | AATAGCAAGTTAAAATAAGGCTAGTCCGTTATCA | |
| | ACTTGAAAAAGTGGCACCGAGTCGGTGCTCTGTA | |
| | TGGGATCAGGCTTCCACTTTGGAAACCCAGCAA | |
| | GACACCT (SEQ ID NO: 726) | |
| 727 | GCGTGAAGACAGGTGTCTTGCGTTTTAGAGCTAG | pegRNA*1, 2, 3, 4, 5, 6, contains end |
| | AAATAGCAAGTTAAAATAAGGCTAGTCCGTTATC | adaptations |
| | AACTTGAAAAAGTGGCACCGAGTCGGTGCATGG | |
| | GATCAGGCTTCCACTTTGGAAACCCAGCAAGAC | |
| | ACCTTTTT (SEQ ID NO: 727) | |
| 728 | CGTGAAGACAGGTGTCTTGCGTTTTAGAGCTAGA | pegRNA*1, 2, 3, 4, 5, 6 |
| | AATAGCAAGTTAAAATAAGGCTAGTCCGTTATCA | |
| | ACTTGAAAAAGTGGCACCGAGTCGGTGCATGGG | |
| | ATCAGGCTTCCACTTTGGAAACCCAGCAAGACA | |
| | CCTGTCTTC (SEQ ID NO: 728) | |
| 729 | CGTGAAGACAGGTGTCTTGCGTTTTAGAGCTAGA | pegRNA*1, 2, 3, 4, 5, 6 |
| | AATAGCAAGTTAAAATAAGGCTAGTCCGTTATCA | |
| | ACTTGAAAAAGTGGCACCGAGTCGGTGCGTATG | |
| | GGATCAGGCTTCCACTTTGGAAACCCAGCAAGA | |
| | CACCTGTCT (SEQ ID NO: 729) | |
| 730 | CGTGAAGACAGGTGTCTTGCGTTTTAGAGCTAGA | pegRNA*1, 2, 3, 4, 5, 6 |
| | AATAGCAAGTTAAAATAAGGCTAGTCCGTTATCA | |
| | ACTTGAAAAAGTGGCACCGAGTCGGTGCTCTGTA | |
| | TGGGATCAGGCTTCCACTTTGGAAACCCAGCAA | |
| | GACACCTGT (SEQ ID NO: 730) | |
| 731 | CGTGAAGACAGGTGTCTTGCGTTTTAGAGCTAGA | pegRNA*1, 2, 3, 4, 5, 6 |
| | AATAGCAAGTTAAAATAAGGCTAGTCCGTTATCA | |
| | ACTTGAAAAAGTGGCACCGAGTCGGTGCTTTCTG | |
| | TATGGGATCAGGCTTCCACTTTGGAAACCCAGCA | |
| | AGACACCT (SEQ ID NO: 731) | |
| 732 | GCGTGAAGACAGGTGTCTTGCGTTTTAGAGCTAG | pegRNA*1, 2, 3, 4, 5, 6, contains end |
| | AAATAGCAAGTTAAAATAAGGCTAGTCCGTTATC | adaptations |
| | AACTTGAAAAAGTGGCACCGAGTCGGTGCATGG | |
| | GATCAGGCTTCCACTTTGGAAACCCAGCAAGAC | |
| | ACCTGTTTTT (SEQ ID NO: 732) | |
| 733 | GCGTGAAGACAGGTGTCTTGCGTTTTAGAGCTAG | pegRNA*1, 2, 3, 4, 5, 6, contains end |
| | AAATAGCAAGTTAAAATAAGGCTAGTCCGTTATC | adaptations |
| | AACTTGAAAAAGTGGCACCGAGTCGGTGCGTAT | |
| | GGGATCAGGCTTCCACTTTGGAAACCCAGCAAG | |
| | ACACCTTTTT (SEQ ID NO: 733) | |
| 734 | CGTGAAGACAGGTGTCTTGCGTTTTAGAGCTAGA | pegRNA*1, 2, 3, 4, 5, 6 |
| | AATAGCAAGTTAAAATAAGGCTAGTCCGTTATCA | |
| | ACTTGAAAAAGTGGCACCGAGTCGGTGCGTATG | |
| | GGATCAGGCTTCCACTTTGGAAACCCAGCAAGA | |
| | CACCTGTCTTC (SEQ ID NO: 734) | |
| 735 | CGTGAAGACAGGTGTCTTGCGTTTTAGAGCTAGA | pegRNA*1, 2, 3, 4, 5, 6 |
| | AATAGCAAGTTAAAATAAGGCTAGTCCGTTATCA | |
| | ACTTGAAAAAGTGGCACCGAGTCGGTGCTCTGTA | |
| | TGGGATCAGGCTTCCACTTTGGAAACCCAGCAA | |
| | GACACCTGTCT (SEQ ID NO: 735) | |
| 736 | CGTGAAGACAGGTGTCTTGCGTTTTAGAGCTAGA | pegRNA*1, 2, 3, 4, 5, 6 |
| | AATAGCAAGTTAAAATAAGGCTAGTCCGTTATCA | |
| | ACTTGAAAAAGTGGCACCGAGTCGGTGCTTTCTG | |
| | TATGGGATCAGGCTTCCACTTTGGAAACCCAGCA | |
| | AGACACCTGT (SEQ ID NO: 736) | |
| 737 | GCGTGAAGACAGGTGTCTTGCGTTTTAGAGCTAG | pegRNA*1, 2, 3, 4, 5, 6, contains end |
| | AAATAGCAAGTTAAAATAAGGCTAGTCCGTTATC | adaptations |
| | AACTTGAAAAAGTGGCACCGAGTCGGTGCATGG | |
| | GATCAGGCTTCCACTTTGGAAACCCAGCAAGAC | |
| | ACCTGTCTTTTT (SEQ ID NO: 737) | |
| 738 | GCGTGAAGACAGGTGTCTTGCGTTTTAGAGCTAG | pegRNA*1, 2, 3, 4, 5, 6, contains end |
| | AAATAGCAAGTTAAAATAAGGCTAGTCCGTTATC | adaptations |
| | AACTTGAAAAAGTGGCACCGAGTCGGTGCGTAT | |
| | GGGATCAGGCTTCCACTTTGGAAACCCAGCAAG | |
| | ACACCTGTTTTT (SEQ ID NO: 738) | |
| 739 | GCGTGAAGACAGGTGTCTTGCGTTTTAGAGCTAG | pegRNA*1, 2, 3, 4, 5, 6, contains end |
| | AAATAGCAAGTTAAAATAAGGCTAGTCCGTTATC | adaptations |
| | AACTTGAAAAAGTGGCACCGAGTCGGTGCTCTGT | |
| | ATGGGATCAGGCTTCCACTTTGGAAACCCAGCA | |
| | AGACACCTTTTT (SEQ ID NO: 739) | |
| 740 | CGTGAAGACAGGTGTCTTGCGTTTTAGAGCTAGA | pegRNA*1, 2, 3, 4, 5, 6 |
| | AATAGCAAGTTAAAATAAGGCTAGTCCGTTATCA | |
| | ACTTGAAAAAGTGGCACCGAGTCGGTGCTCTGTA | |
| | TGGGATCAGGCTTCCACTTTGGAAACCCAGCAA | |
| | GACACCTGTCTTC (SEQ ID NO: 740) | |
| 741 | CGTGAAGACAGGTGTCTTGCGTTTTAGAGCTAGA | pegRNA*1, 2, 3, 4, 5, 6 |
| | AATAGCAAGTTAAAATAAGGCTAGTCCGTTATCA | |
| | ACTTGAAAAAGTGGCACCGAGTCGGTGCTTTCTG | |
| | TATGGGATCAGGCTTCCACTTTGGAAACCCAGCA | |
| | AGACACCTGTCT (SEQ ID NO: 741) | |
| 742 | GCGTGAAGACAGGTGTCTTGCGTTTTAGAGCTAG | pegRNA*1, 2, 3, 4, 5, 6, contains end |
| | AAATAGCAAGTTAAAATAAGGCTAGTCCGTTATC | adaptations |
| | AACTTGAAAAAGTGGCACCGAGTCGGTGCATGG | |
| | GATCAGGCTTCCACTTTGGAAACCCAGCAAGAC | |
| | ACCTGTCTTCTTTT (SEQ ID NO: 742) | |
| 743 | GCGTGAAGACAGGTGTCTTGCGTTTTAGAGCTAG | pegRNA*1, 2, 3, 4, 5, 6, contains end |
| | AAATAGCAAGTTAAAATAAGGCTAGTCCGTTATC | adaptations |
| | AACTTGAAAAAGTGGCACCGAGTCGGTGCGTAT | |
| | GGGATCAGGCTTCCACTTTGGAAACCCAGCAAG | |
| | ACACCTGTCTTTTT (SEQ ID NO: 743) | |
| 744 | GCGTGAAGACAGGTGTCTTGCGTTTTAGAGCTAG | pegRNA*1, 2, 3, 4, 5, 6, contains end |
| | AAATAGCAAGTTAAAATAAGGCTAGTCCGTTATC | adaptations |
| | AACTTGAAAAAGTGGCACCGAGTCGGTGCTCTGT | |
| | ATGGGATCAGGCTTCCACTTTGGAAACCCAGCA | |
| | AGACACCTGTTTTT (SEQ ID NO: 744) | |
| 745 | GCGTGAAGACAGGTGTCTTGCGTTTTAGAGCTAG | pegRNA*1, 2, 3, 4, 5, 6, contains end |
| | AAATAGCAAGTTAAAATAAGGCTAGTCCGTTATC | adaptations |
| | AACTTGAAAAAGTGGCACCGAGTCGGTGCTTTCT | |
| | GTATGGGATCAGGCTTCCACTTTGGAAACCCAGC | |
| | AAGACACCTTTTT (SEQ ID NO: 745) | |
| 746 | CGTGAAGACAGGTGTCTTGCGTTTTAGAGCTAGA | pegRNA*1, 2, 3, 4, 5, 6 |
| | AATAGCAAGTTAAAATAAGGCTAGTCCGTTATCA | |
| | ACTTGAAAAAGTGGCACCGAGTCGGTGCTTTCTG | |
| | TATGGGATCAGGCTTCCACTTTGGAAACCCAGCA | |
| | AGACACCTGTCTTC (SEQ ID NO: 746) | |
| 747 | GCGTGAAGACAGGTGTCTTGCGTTTTAGAGCTAG | pegRNA*1, 2, 3, 4, 5, 6, contains end |
| | AAATAGCAAGTTAAAATAAGGCTAGTCCGTTATC | adaptations |
| | AACTTGAAAAAGTGGCACCGAGTCGGTGCGTAT | |
| | GGGATCAGGCTTCCACTTTGGAAACCCAGCAAG | |
| | ACACCTGTCTTCTTTT (SEQ ID NO: 747) | |
| 748 | GCGTGAAGACAGGTGTCTTGCGTTTTAGAGCTAG | pegRNA*1, 2, 3, 4, 5, 6, contains end |
| | AAATAGCAAGTTAAAATAAGGCTAGTCCGTTATC | adaptations |
| | AACTTGAAAAAGTGGCACCGAGTCGGTGCTCTGT | |
| | ATGGGATCAGGCTTCCACTTTGGAAACCCAGCA | |
| | AGACACCTGTCTTTTT (SEQ ID NO: 748) | |
| 749 | GCGTGAAGACAGGTGTCTTGCGTTTTAGAGCTAG | pegRNA*1, 2, 3, 4, 5, 6, contains end |
| | AAATAGCAAGTTAAAATAAGGCTAGTCCGTTATC | adaptations |
| | AACTTGAAAAAGTGGCACCGAGTCGGTGCTTTCT | |
| | GTATGGGATCAGGCTTCCACTTTGGAAACCCAGC | |
| | AAGACACCTGTTTTT (SEQ ID NO: 749) | |
| 750 | GCGTGAAGACAGGTGTCTTGCGTTTTAGAGCTAG | pegRNA*1, 2, 3, 4, 5, 6, contains end |
| | AAATAGCAAGTTAAAATAAGGCTAGTCCGTTATC | adaptations |
| | AACTTGAAAAAGTGGCACCGAGTCGGTGCTCTGT | |
| | ATGGGATCAGGCTTCCACTTTGGAAACCCAGCA | |
| | AGACACCTGTCTTCTTTT (SEQ ID NO: 750) | |
| 751 | GCGTGAAGACAGGTGTCTTGCGTTTTAGAGCTAG | pegRNA*1, 2, 3, 4, 5, 6, contains end |
| | AAATAGCAAGTTAAAATAAGGCTAGTCCGTTATC | adaptations |
| | AACTTGAAAAAGTGGCACCGAGTCGGTGCTTTCT | |
| | GTATGGGATCAGGCTTCCACTTTGGAAACCCAGC | |
| | AAGACACCTGTCTTTTT (SEQ ID NO: 751) | |
| 752 | GCGTGAAGACAGGTGTCTTGCGTTTTAGAGCTAG | pegRNA*1, 2, 3, 4, 5, 6, contains end |
| | AAATAGCAAGTTAAAATAAGGCTAGTCCGTTATC | adaptations |
| | AACTTGAAAAAGTGGCACCGAGTCGGTGCTTTCT | |
| | GTATGGGATCAGGCTTCCACTTTGGAAACCCAGC | |
| | AAGACACCTGTCTTCTTTT (SEQ ID NO: 752) | |
| 49 | TTTCTTGTGATTATCAGTTTGTTTTAGAGCTAGAA | PE3 ngRNA (TG; TGG PAM) |
| | ATAGCAAGTTAAAATAAGGCTAGTCCGTTATCAA | |
| | CTTGAAAAAGTGGCACCGAGTCGGTGC (SEQ ID | |
| | NO: 49) | |
| 50 | GGATGCAGAAGCTTTCTGTAGTTTTAGAGCTAGA | PE3 ngRNA (TG; TGG PAM) |
| | AATAGCAAGTTAAAATAAGGCTAGTCCGTTATCA | |
| | ACTTGAAAAAGTGGCACCGAGTCGGTGC (SEQ ID | |
| | NO: 50) | |
| 51 | GAAGCTTTCTGTATGGGATCGTTTTAGAGCTAGA | PE3b*4 ngRNA (AG; AGG PAM) |
| | AATAGCAAGTTAAAATAAGGCTAGTCCGTTATCA | |
| | ACTTGAAAAAGTGGCACCGAGTCGGTGC (SEQ ID | |
| | NO: 51) | |
| 52 | ATGGGATCAGGCTTCCACTTGTTTTAGAGCTAGA | PE3b*3 ngRNA (TG; TGG PAM) |
| | AATAGCAAGTTAAAATAAGGCTAGTCCGTTATCA | |
| | ACTTGAAAAAGTGGCACCGAGTCGGTGC (SEQ ID | |
| | NO: 52) | |
| 53 | GGATGCAGAAGCTTTCTGTAGTTTTAGAGCTAGA | PE3 ngRNA (TG; TGG PAM), contains end |
| | AATAGCAAGTTAAAATAAGGCTAGTCCGTTATCA | adaptations |
| | ACTTGAAAAAGTGGCACCGAGTCGGTGCTTTT | |
| | (SEQ ID NO: 53) | |
| 54 | GAAGCTTTCTGTATGGGATCGTTTTAGAGCTAGA | PE3b*4 ngRNA (AG; AGG PAM), contains |
| | AATAGCAAGTTAAAATAAGGCTAGTCCGTTATCA | end adaptations |
| | ACTTGAAAAAGTGGCACCGAGTCGGTGCTTTT | |
| | (SEQ ID NO: 54) | |
| 55 | GTTTCTTGTGATTATCAGTTTGTTTTAGAGCTAGA | PE3 ngRNA (TG; TGG PAM), contains end |
| | AATAGCAAGTTAAAATAAGGCTAGTCCGTTATCA | adaptations |
| | ACTTGAAAAAGTGGCACCGAGTCGGTGCTTTT | |
| | (SEQ ID NO: 55) | |
| 56 | GATGGGATCAGGCTTCCACTTGTTTTAGAGCTAG | PE3b*3 ngRNA (TG; TGG PAM), contains |
| | AAATAGCAAGTTAAAATAAGGCTAGTCCGTTATC | end adaptations |
| | AACTTGAAAAAGTGGCACCGAGTCGGTGCTTTT | |
| | (SEQ ID NO: 56) | |
| 57 | GGATGCAGAAGCTTTCTGTAGTTTTAGAGCTAGA | PE3 ngRNA (TG; TGG PAM), contains linker |
| | AATAGCAAGTTAAAATAAGGCTAGTCCGTTATCA | sequence AACATTGA; hairpin SEQ ID |
| | ACTTGAAAAAGTGGCACCGAGTCGGTGCAACAT | NO: 3591; end adaptations |
| | TGACGCGTCTCTACGTGGGGGCGCGTTTT (SEQ | |
| | ID NO: 57) | |
| 58 | GAAGCTTTCTGTATGGGATCGTTTTAGAGCTAGA | PE3b*4 ngRNA (AG; AGG PAM), contains |
| | AATAGCAAGTTAAAATAAGGCTAGTCCGTTATCA | linker sequence AACATTGA; hairpin SEQ ID |
| | ACTTGAAAAAGTGGCACCGAGTCGGTGCAACAT | NO: 3591; end adaptations |
| | TGACGCGTCTCTACGTGGGGGCGCGTTTT (SEQ | |
| | ID NO: 58) | |
| 59 | GTTTCTTGTGATTATCAGTTTGTTTTAGAGCTAGA | PE3 ngRNA (TG; TGG PAM), contains linker |
| | AATAGCAAGTTAAAATAAGGCTAGTCCGTTATCA | sequence AACATTGA; hairpin SEQ ID |
| | ACTTGAAAAAGTGGCACCGAGTCGGTGCAACAT | NO: 3591; end adaptations |
| | TGACGCGTCTCTACGTGGGGGCGCGTTTT (SEQ | |
| | ID NO: 59) | |
| 60 | GATGGGATCAGGCTTCCACTTGTTTTAGAGCTAG | PE3b*3 ngRNA (TG; TGG PAM), contains |
| | AAATAGCAAGTTAAAATAAGGCTAGTCCGTTATC | linker sequence AACATTGA; hairpin SEQ ID |
| | AACTTGAAAAAGTGGCACCGAGTCGGTGCAACA | NO: 3591; end adaptations |
| | TTGACGCGTCTCTACGTGGGGGCGCGTTTT (SEQ | |
| | ID NO: 60) | |

TABLE 11

| Sequence | | |
|---|---|---|
| Number | Sequence | Description |
| 753 | AGCCACGTGAAGACAGG (SEQ ID NO: 753) | PEgRNA spacer (TG PAM) |
| 754 | GAGCCACGTGAAGACAGG (SEQ ID NO: 754) | PEgRNA spacer (TG PAM) |
| 755 | TGAGCCACGTGAAGACAGG (SEQ ID NO: 755) | PEgRNA spacer (TG PAM) |
| 205 | CTGAGCCACGTGAAGACAGG (SEQ ID NO: 205) | PEgRNA spacer (TG PAM) |
| 756 | ACTGAGCCACGTGAAGACAGG (SEQ ID NO: 756) | PEgRNA spacer (TG PAM) |
| 757 | AACTGAGCCACGTGAAGACAGG (SEQ ID NO: 757) | PEgRNA spacer (TG PAM) |
| 758 | GTCTT | PBS |
| 759 | GTCTTC | PBS |
| 760 | GTCTTCA | PBS |
| 761 | GTCTTCAC | PBS |
| 762 | GTCTTCACG | PBS |
| 763 | GTCTTCACGT (SEQ ID NO: 763) | PBS |
| 764 | GTCTTCACGTG (SEQ ID NO: 764) | PBS |
| 765 | GTCTTCACGTGG (SEQ ID NO: 765) | PBS |
| 766 | GTCTTCACGTGGC (SEQ ID NO: 766) | PBS |
| 767 | GTCTTCACGTGGCT (SEQ ID NO: 767) | PBS |
| 768 | GTCTTCACGTGGCTC (SEQ ID NO: 768) | PBS |
| 769 | GTCTTCACGTGGCTCA (SEQ ID NO: 769) | PBS |
| 770 | GTCTTCACGTGGCTCAG (SEQ ID NO: 770) | PBS |
| 771 | GTCTTCACGTGGCTCAGT (SEQ ID NO: 771) | PBS |
| 772 | GTCTTCACGTGGCTCAGTT (SEQ ID NO: 772) | PBS |
| 773 | GATCAGGCTTCCACTTTGGAAACCCAGCAAGAC | RTT*1, 2, 3, 5 |
| | ACCT (SEQ ID NO: 773) | |
| 774 | GATCAGGCTTCCACTTTGGAAACCCAGCAAGAT | RTT*1, 2, 3, 4, 5 (TG-to-TA PAM silencing |
| | ACCT (SEQ ID NO: 774) | edit) |
| 775 | GGATCAGGCTTCCACTTTGGAAACCCAGCAAGA | RTT*1, 2, 3, 5 |
| | CACCT (SEQ ID NO: 775) | |
| 776 | GGATCAGGCTTCCACTTTGGAAACCCAGCAAGA | RTT*1, 2, 3, 4, 5 (TG-to-TA PAM silencing |
| | TACCT (SEQ ID NO: 776) | edit) |
| 777 | GGGATCAGGCTTCCACTTTGGAAACCCAGCAAG | RTT*1, 2, 3, 5 |
| | ACACCT (SEQ ID NO: 777) | |
| 778 | GGGATCAGGCTTCCACTTTGGAAACCCAGCAAG | RTT*1, 2, 3, 4, 5 (TG-to-TA PAM silencing |
| | ATACCT (SEQ ID NO: 778) | edit) |
| 779 | TGGGATCAGGCTTCCACTTTGGAAACCCAGCAA | RTT*1, 2, 3, 5 |
| | GACACCT (SEQ ID NO: 779) | |
| 780 | TGGGATCAGGCTTCCACTTTGGAAACCCAGCAA | RTT*1, 2, 3, 4, 5 (TG-to-TA PAM silencing |
| | GATACCT (SEQ ID NO: 780) | edit) |
| 24 | AAGATGGCTCAAGATTCAGT (SEQ ID NO: 24) | PE3 ngRNA spacer (AG PAM) |
| 25 | AAGATTCAGTAGATCTTTCT (SEQ ID NO: 25) | PE3 ngRNA spacer (TG PAM) |
| 26 | AAGCTTTCTGTATGGGATCA (SEQ ID NO: 26) | PE3b*1 ngRNA spacer (GG PAM) |
| 27 | AGATCTTTCTTGTGATTATC (SEQ ID NO: 27) | PE3 ngRNA spacer (AG PAM) |
| 28 | ATGGGATCAGGCTTCCACTT (SEQ ID NO: 28) | PE3b*2 ngRNA spacer (TG PAM) |
| 29 | CCTTTTCGCTTTTTCCAAGA (SEQ ID NO: 29) | PE3 ngRNA spacer (TG PAM) |
| 30 | CTTTTCGCTTTTTCCAAGAT (SEQ ID NO: 30) | PE3 ngRNA spacer (GG PAM) |
| 31 | GAAGCTTTCTGTATGGGATC (SEQ ID NO: 31) | PE3b*3 ngRNA spacer (AG PAM) |
| 32 | GATGCAGAAGCTTTCTGTAT (SEQ ID NO: 32) | PE3 ngRNA spacer (GG PAM) |
| 33 | GATTCAGTAGATCTTTCTTG (SEQ ID NO: 33) | PE3 ngRNA spacer (TG PAM) |
| 34 | GCTTTTTCCAAGATGGCTCA (SEQ ID NO: 34) | PE3 ngRNA spacer (AG PAM) |
| 35 | GGATGCAGAAGCTTTCTGTA (SEQ ID NO: 35) | PE3 ngRNA spacer (TG PAM) |
| 36 | GGCTTCCACTTTGGAAACCC (SEQ ID NO: 36) | PE3 ngRNA spacer (AG PAM) |
| 37 | GTGAAGGGACATCACCTTTT (SEQ ID NO: 37) | PE3 ngRNA spacer (CG PAM) |
| 38 | TCACCTTTTCGCTTTTTCCA (SEQ ID NO: 38) | PE3 ngRNA spacer (AG PAM) |
| 39 | TCCAAGATGGCTCAAGATTC (SEQ ID NO: 39) | PE3 ngRNA spacer (AG PAM) |
| 40 | TCCACTTTGGAAACCCAGCA (SEQ ID NO: 40) | PE3 ngRNA spacer (AG PAM) |
| 41 | TGATTATCAGTTTTGGATGC (SEQ ID NO: 41) | PE3 ngRNA spacer (AG PAM) |
| 42 | TGGAAACCCAGCAAGACACC (SEQ ID NO: 42) | PE3 ngRNA spacer (TG PAM) |
| 781 | TGGAAACCCAGCAAGATACC (SEQ ID NO: 781) | PE3b*4 ngRNA spacer (TG PAM) |
| 43 | TGGGATCAGGCTTCCACTTT (SEQ ID NO: 43) | PE3b*5 ngRNA spacer (GG PAM) |
| 44 | TTATCAGTTTTGGATGCAGA (SEQ ID NO: 44) | PE3 ngRNA spacer (AG PAM) |
| 45 | TTCTTGTGATTATCAGTTTT (SEQ ID NO: 45) | PE3 ngRNA spacer (GG PAM) |
| 46 | TTGTGATTATCAGTTTTGGA (SEQ ID NO: 46) | PE3 ngRNA spacer (TG PAM) |
| 47 | TTTCTTGTGATTATCAGTTT (SEQ ID NO: 47) | PE3 ngRNA spacer (TG PAM) |
| 48 | TTTTGGATGCAGAAGCTTTC (SEQ ID NO: 48) | PE3 ngRNA spacer (TG PAM) |
| 49 | TTTCTTGTGATTATCAGTTTGTTTTAGAGCTAGAA | PE3 ngRNA (TG PAM) |
| | ATAGCAAGTTAAAATAAGGCTAGTCCGTTATCAA | |
| | CTTGAAAAAGTGGCACCGAGTCGGTGC (SEQ ID | |
| | NO: 49) | |
| 50 | GGATGCAGAAGCTTTCTGTAGTTTTAGAGCTAGA | PE3 ngRNA (TG PAM) |
| | AATAGCAAGTTAAAATAAGGCTAGTCCGTTATCA | |
| | ACTTGAAAAAGTGGCACCGAGTCGGTGC (SEQ ID | |
| | NO: 50) | |
| 51 | GAAGCTTTCTGTATGGGATCGTTTTAGAGCTAGA | PE3b*3 ngRNA (AG PAM) |
| | AATAGCAAGTTAAAATAAGGCTAGTCCGTTATCA | |
| | ACTTGAAAAAGTGGCACCGAGTCGGTGC (SEQ ID | |
| | NO: 51) | |
| 52 | ATGGGATCAGGCTTCCACTTGTTTTAGAGCTAGA | PE3b*2 ngRNA (TG PAM) |
| | AATAGCAAGTTAAAATAAGGCTAGTCCGTTATCA | |
| | ACTTGAAAAAGTGGCACCGAGTCGGTGC (SEQ ID | |
| | NO: 52) | |
| 53 | GGATGCAGAAGCTTTCTGTAGTTTTAGAGCTAGA | PE3 ngRNA (TG PAM), contains end |
| | AATAGCAAGTTAAAATAAGGCTAGTCCGTTATCA | adaptations |
| | ACTTGAAAAAGTGGCACCGAGTCGGTGCTTTT | |
| | (SEQ ID NO: 53) | |
| 54 | GAAGCTTTCTGTATGGGATCGTTTTAGAGCTAGA | PE3b*3 ngRNA (AG PAM), contains end |
| | AATAGCAAGTTAAAATAAGGCTAGTCCGTTATCA | adaptations |
| | ACTTGAAAAAGTGGCACCGAGTCGGTGCTTTT | |
| | (SEQ ID NO: 54) | |
| 55 | GTTTCTTGTGATTATCAGTTTGTTTTAGAGCTAGA | PE3 ngRNA (TG PAM), contains end |
| | AATAGCAAGTTAAAATAAGGCTAGTCCGTTATCA | adaptations |
| | ACTTGAAAAAGTGGCACCGAGTCGGTGCTTTT | |
| | (SEQ ID NO: 55) | |
| 56 | GATGGGATCAGGCTTCCACTTGTTTTAGAGCTAG | PE3b*2 ngRNA (TG PAM), contains end |
| | AAATAGCAAGTTAAAATAAGGCTAGTCCGTTATC | adaptations |
| | AACTTGAAAAAGTGGCACCGAGTCGGTGCTTTT | |
| | (SEQ ID NO: 56) | |
| 57 | GGATGCAGAAGCTTTCTGTAGTTTTAGAGCTAGA | PE3 ngRNA (TG PAM), contains linker |
| | AATAGCAAGTTAAAATAAGGCTAGTCCGTTATCA | sequence AACATTGA; hairpin SEQ ID |
| | ACTTGAAAAAGTGGCACCGAGTCGGTGCAACAT | NO: 3591; end adaptations |
| | TGACGCGTCTCTACGTGGGGGCGCGTTTT (SEQ | |
| | ID NO: 57) | |
| 58 | GAAGCTTTCTGTATGGGATCGTTTTAGAGCTAGA | PE3b*3 ngRNA (AG PAM), contains linker |
| | AATAGCAAGTTAAAATAAGGCTAGTCCGTTATCA | sequence AACATTGA; hairpin SEQ ID |
| | ACTTGAAAAAGTGGCACCGAGTCGGTGCAACAT | NO: 3591; end adaptations |
| | TGACGCGTCTCTACGTGGGGGCGCGTTTT (SEQ | |
| | ID NO: 58) | |
| 59 | GTTTCTTGTGATTATCAGTTTGTTTTAGAGCTAGA | PE3 ngRNA (TG PAM), contains linker |
| | AATAGCAAGTTAAAATAAGGCTAGTCCGTTATCA | sequence AACATTGA; hairpin SEQ ID |
| | ACTTGAAAAAGTGGCACCGAGTCGGTGCAACAT | NO: 3591; end adaptations |
| | TGACGCGTCTCTACGTGGGGGCGCGTTTT (SEQ | |
| | ID NO: 59) | |
| 60 | GATGGGATCAGGCTTCCACTTGTTTTAGAGCTAG | PE3b*2 ngRNA (TG PAM), contains linker |
| | AAATAGCAAGTTAAAATAAGGCTAGTCCGTTATC | sequence AACATTGA; hairpin SEQ ID |
| | AACTTGAAAAAGTGGCACCGAGTCGGTGCAACA | NO: 3591; end adaptations |
| | TTGACGCGTCTCTACGTGGGGGCGCGTTTT (SEQ | |
| | ID NO: 60) | |

TABLE 12

| Sequence | | |
|---|---|---|
| Number | Sequence | Description |
| 782 | GGTTTCCAAAGTGGAAG (SEQ ID NO: 782) | PEgRNA spacer (CCTGAT PAM) |
| 783 | GGGTTTCCAAAGTGGAAG (SEQ ID NO: 783) | PEgRNA spacer (CCTGAT PAM) |
| 784 | TGGGTTTCCAAAGTGGAAG (SEQ ID NO: 784) | PEgRNA spacer (CCTGAT PAM) |
| 413 | CTGGGTTTCCAAAGTGGAAG (SEQ ID NO: 413) | PEgRNA spacer (CCTGAT PAM) |
| 785 | GCTGGGTTTCCAAAGTGGAAG (SEQ ID NO: 785) | PEgRNA spacer (CCTGAT PAM) |
| 786 | TGCTGGGTTTCCAAAGTGGAAG (SEQ ID NO: 786) | PEgRNA spacer (CCTGAT PAM) |
| 787 | CCACT | PBS |
| 788 | CCACTT | PBS |
| 789 | CCACTTT | PBS |
| 790 | CCACTTTG | PBS |
| 791 | CCACTTTGG | PBS |
| 792 | CCACTTTGGA (SEQ ID NO: 792) | PBS |
| 793 | CCACTTTGGAA (SEQ ID NO: 793) | PBS |
| 794 | CCACTTTGGAAA (SEQ ID NO: 794) | PBS |
| 795 | CCACTTTGGAAAC (SEQ ID NO: 795) | PBS |
| 796 | CCACTTTGGAAACC (SEQ ID NO: 796) | PBS |
| 797 | CCACTTTGGAAACCC (SEQ ID NO: 797) | PBS |
| 798 | CCACTTTGGAAACCCA (SEQ ID NO: 798) | PBS |
| 799 | CCACTTTGGAAACCCAG (SEQ ID NO: 799) | PBS |
| 800 | CCACTTTGGAAACCCAGC (SEQ ID NO: 800) | PBS |
| 801 | CCACTTTGGAAACCCAGCA (SEQ ID NO: 801) | PBS |
| 802 | GATCAGGCTT (SEQ ID NO: 802) | RTT |
| 803 | GGATCAGGCTT (SEQ ID NO: 803) | RTT |
| 804 | GGGATCAGGCTT (SEQ ID NO: 804) | RTT |
| 805 | TGGGATCAGGCTT (SEQ ID NO: 805) | RTT |
| 806 | ATGGGATCAGGCTT (SEQ ID NO: 806) | RTT |
| 807 | TATGGGATCAGGCTT (SEQ ID NO: 807) | RTT |
| 808 | GTATGGGATCAGGCTT (SEQ ID NO: 808) | RTT |
| 809 | TGTATGGGATCAGGCTT (SEQ ID NO: 809) | RTT |
| 810 | CTGTATGGGATCAGGCTT (SEQ ID NO: 810) | RTT |
| 811 | TCTGTATGGGATCAGGCTT (SEQ ID NO: 811) | RTT |
| 812 | TTCTGTATGGGATCAGGCTT (SEQ ID NO: 812) | RTT |
| 813 | TTTCTGTATGGGATCAGGCTT (SEQ ID NO: 813) | RTT |
| 814 | CTTTCTGTATGGGATCAGGCTT (SEQ ID NO: 814) | RTT |
| 815 | GCTTTCTGTATGGGATCAGGCTT (SEQ ID NO: 815) | RTT |
| 816 | AGCTTTCTGTATGGGATCAGGCTT (SEQ ID NO: | RTT |
| | 816) | |
| 817 | AAGCTTTCTGTATGGGATCAGGCTT (SEQ ID NO: | RTT |
| | 817) | |
| 818 | GAAGCTTTCTGTATGGGATCAGGCTT (SEQ ID | RTT |
| | NO: 818) | |
| 819 | AGAAGCTTTCTGTATGGGATCAGGCTT (SEQ ID | RTT |
| | NO: 819) | |
| 820 | CAGAAGCTTTCTGTATGGGATCAGGCTT (SEQ ID | RTT |
| | NO: 820) | |
| 821 | GCAGAAGCTTTCTGTATGGGATCAGGCTT (SEQ | RTT |
| | ID NO: 821) | |
| 822 | TGCAGAAGCTTTCTGTATGGGATCAGGCTT (SEQ | RTT |
| | ID NO: 822) | |
| 823 | ATGCAGAAGCTTTCTGTATGGGATCAGGCTT | RTT |
| | (SEQ ID NO: 823) | |
| 824 | GATGCAGAAGCTTTCTGTATGGGATCAGGCTT | RTT |
| | (SEQ ID NO: 824) | |
| 825 | GGATGCAGAAGCTTTCTGTATGGGATCAGGCTT | RTT |
| | (SEQ ID NO: 825) | |
| 826 | TGGATGCAGAAGCTTTCTGTATGGGATCAGGCTT | RTT |
| | (SEQ ID NO: 826) | |
| 827 | TTGGATGCAGAAGCTTTCTGTATGGGATCAGGCT | RTT |
| | T (SEQ ID NO: 827) | |
| 828 | TTTGGATGCAGAAGCTTTCTGTATGGGATCAGGC | RTT |
| | TT (SEQ ID NO: 828) | |
| 829 | TTTTGGATGCAGAAGCTTTCTGTATGGGATCAGG | RTT |
| | CTT (SEQ ID NO: 829) | |
| 830 | GTTTTGGATGCAGAAGCTTTCTGTATGGGATCAG | RTT |
| | GCTT (SEQ ID NO: 830) | |
| 831 | AGTTTTGGATGCAGAAGCTTTCTGTATGGGATCA | RTT |
| | GGCTT (SEQ ID NO: 831) | |
| 832 | CAGTTTTGGATGCAGAAGCTTTCTGTATGGGATC | RTT |
| | AGGCTT (SEQ ID NO: 832) | |
| 25 | AAGATTCAGTAGATCTTTCT (SEQ ID NO: 25) | PE3 ngRNA spacer (TGTGAT PAM) |
| 128 | AGTAGATCTTTCTTGTGATT (SEQ ID NO: 128) | PE3 ngRNA spacer (ATCAGT PAM) |
| 129 | CATCACCTTTTCGCTTTTTC (SEQ ID NO: 129) | PE3 ngRNA spacer (CAAGAT PAM) |
| 130 | CCAAGATGGCTCAAGATTCA (SEQ ID NO: 130) | PE3 ngRNA spacer (GTAGAT PAM) |
| 131 | CTTTCTTGTGATTATCAGTT (SEQ ID NO: 131) | PE3 ngRNA spacer (TTGGAT PAM) |
| 133 | TCGCTTTTTCCAAGATGGCT (SEQ ID NO: 133) | PE3 ngRNA spacer (CAAGAT PAM) |
| 134 | TGGATGCAGAAGCTTTCTGT (SEQ ID NO: 134) | PE3 ngRNA spacer (ATGGAT PAM) |
| 135 | TTTTCCAAGATGGCTCAAGA (SEQ ID NO: 135) | PE3 ngRNA spacer (TTCAGT PAM) |

TABLE 13

| Sequence | | |
|---|---|---|
| Number | Sequence | Description |
| 833 | TCTTGTGATTATCAGTT (SEQ ID NO: 833) | PEgRNA spacer (TTGG; TTGGAT PAM) |
| 834 | TTCTTGTGATTATCAGTT (SEQ ID NO: 834) | PEgRNA spacer (TTGG; TTGGAT PAM) |
| 835 | TTTCTTGTGATTATCAGTT (SEQ ID NO: 835) | PEgRNA spacer (TTGG; TTGGAT PAM) |
| 131 | CTTTCTTGTGATTATCAGTT (SEQ ID NO: 131) | PEgRNA spacer (TTGG; TTGGAT PAM) |
| 836 | TCTTTCTTGTGATTATCAGTT (SEQ ID NO: 836) | PEgRNA spacer (TTGG; TTGGAT PAM) |
| 837 | ATCTTTCTTGTGATTATCAGTT (SEQ ID NO: 837) | PEgRNA spacer (TTGG; TTGGAT PAM) |
| 838 | TGATA | PBS |
| 839 | TGATAA | PBS |
| 840 | TGATAAT | PBS |
| 841 | TGATAATC | PBS |
| 842 | TGATAATCA | PBS |
| 843 | TGATAATCAC (SEQ ID NO: 843) | PBS |
| 844 | TGATAATCACA (SEQ ID NO: 844) | PBS |
| 845 | TGATAATCACAA (SEQ ID NO: 845) | PBS |
| 846 | TGATAATCACAAG (SEQ ID NO: 846) | PBS |
| 847 | TGATAATCACAAGA (SEQ ID NO: 847) | PBS |
| 848 | TGATAATCACAAGAA (SEQ ID NO: 848) | PBS |
| 849 | TGATAATCACAAGAAA (SEQ ID NO: 849) | PBS |
| 850 | TGATAATCACAAGAAAG (SEQ ID NO: 850) | PBS |
| 851 | TGATAATCACAAGAAAGA (SEQ ID NO: 851) | PBS |
| 852 | TGATAATCACAAGAAAGAT (SEQ ID NO: 852) | PBS |
| 853 | CCCATACAGAAAGCTTCTGCATCCAAAAC (SEQ | RTT |
| | ID NO: 853) | |
| 854 | TCCCATACAGAAAGCTTCTGCATCCAAAAC (SEQ | RTT |
| | ID NO: 854) | |
| 855 | ATCCCATACAGAAAGCTTCTGCATCCAAAAC | RTT |
| | (SEQ ID NO: 855) | |
| 856 | GATCCCATACAGAAAGCTTCTGCATCCAAAAC | RTT |
| | (SEQ ID NO: 856) | |
| 857 | TGATCCCATACAGAAAGCTTCTGCATCCAAAAC | RTT |
| | (SEQ ID NO: 857) | |
| 858 | CTGATCCCATACAGAAAGCTTCTGCATCCAAAAC | RTT |
| | (SEQ ID NO: 858) | |
| 859 | CCTGATCCCATACAGAAAGCTTCTGCATCCAAAA | RTT |
| | C (SEQ ID NO: 859) | |
| 860 | GCCTGATCCCATACAGAAAGCTTCTGCATCCAAA | RTT |
| | AC (SEQ ID NO: 860) | |
| 861 | AGCCTGATCCCATACAGAAAGCTTCTGCATCCAA | RTT |
| | AAC (SEQ ID NO: 861) | |
| 862 | AAGCCTGATCCCATACAGAAAGCTTCTGCATCCA | RTT |
| | AAAC (SEQ ID NO: 862) | |
| 863 | GAAGCCTGATCCCATACAGAAAGCTTCTGCATCC | RTT |
| | AAAAC (SEQ ID NO: 863) | |
| 864 | GGAAGCCTGATCCCATACAGAAAGCTTCTGCATC | RTT |
| | CAAAAC (SEQ ID NO: 864) | |
| 410 | AAGCTTCTGCATCCAAAACT (SEQ ID NO: 410) | PE3 ngRNA spacer (GATAAT PAM) |
| 480 | AAGGCTTCATACATCTTCCT (SEQ ID NO: 480) | PE3 ngRNA spacer (TAGG PAM) |
| 64 | ACGTGAAGACAGGTGTCTTG (SEQ ID NO: 64) | PE3 ngRNA spacer (CTGG; CTGGGT PAM) |
| 411 | AGAAAGCTTCTGCATCCAAA (SEQ ID NO: 411) | PE3 ngRNA spacer (ACTGAT PAM) |
| 482 | CACTACTTACCATCTCTTTC (SEQ ID NO: 482) | PE3 ngRNA spacer (AAGG PAM) |
| 412 | CAGGTGTCTTGCTGGGTTTC (SEQ ID NO: 412) | PE3 ngRNA spacer (CAAAGT PAM) |
| 203 | CGTGAAGACAGGTGTCTTGC (SEQ ID NO: 203) | PE3 ngRNA spacer (TGGG PAM) |
| 413 | CTGGGTTTCCAAAGTGGAAG (SEQ ID NO: 413) | PE3 ngRNA spacer (CCTGAT PAM) |
| 485 | GGAACTGAGCCACGTGAAGA (SEQ ID NO: 485) | PE3 ngRNA spacer (CAGG PAM) |
| 542 | TACATCTTCCTTAGGAACTC (SEQ ID NO: 542) | PE3 ngRNA spacer (CTGG PAM) |
| 414 | TGGAACTGAGCCACGTGAAG (SEQ ID NO: 414) | PE3 ngRNA spacer (ACAGGT PAM) |
| 543 | TGTCTTGCTGGGTTTCCAAA (SEQ ID NO: 543) | PE3 ngRNA spacer (GTGG PAM) |
| 325 | CGTGAAGACAGGTGTCTTGCGTTTTAGAGCTAGA | PE3 ngRNA (TGGG PAM) |
| | AATAGCAAGTTAAAATAAGGCTAGTCCGTTATCA | |
| | ACTTGAAAAAGTGGCACCGAGTCGGTGC (SEQ ID | |
| | NO: 325) | |
| 333 | GCGTGAAGACAGGTGTCTTGCGTTTTAGAGCTAG | PE3 ngRNA (TGGG PAM), contains end |
| | AAATAGCAAGTTAAAATAAGGCTAGTCCGTTATC | adaptations |
| | AACTTGAAAAAGTGGCACCGAGTCGGTGCTTTT | |
| | (SEQ ID NO: 333) | |
| 340 | GCGTGAAGACAGGTGTCTTGCGTTTTAGAGCTAG | PE3 ngRNA (TGGG PAM), contains linker |
| | AAATAGCAAGTTAAAATAAGGCTAGTCCGTTATC | sequence AACATTGA; hairpin SEQ ID |
| | AACTTGAAAAAGTGGCACCGAGTCGGTGCAACA | NO: 3591; end adaptations |
| | TTGACGCGTCTCTACGTGGGGGCGCGTTTT (SEQ | |
| | ID NO: 340) | |

TABLE 14

| Sequence | | |
|---|---|---|
| Number | Sequence | Description |
| 865 | GCAGAAGCTTTCTGTAT (SEQ ID NO: 865) | PEgRNA spacer (GG; GGA PAM) |
| 866 | TGCAGAAGCTTTCTGTAT (SEQ ID NO: 866) | PEgRNA spacer (GG; GGA PAM) |
| 867 | ATGCAGAAGCTTTCTGTAT (SEQ ID NO: 867) | PEgRNA spacer (GG; GGA PAM) |
| 32 | GATGCAGAAGCTTTCTGTAT (SEQ ID NO: 32) | PEgRNA spacer (GG; GGA PAM) |
| 868 | GGATGCAGAAGCTTTCTGTAT (SEQ ID NO: 868) | PEgRNA spacer (GG; GGA PAM) |
| 869 | TGGATGCAGAAGCTTTCTGTAT (SEQ ID NO: 869) | PEgRNA spacer (GG; GGA PAM) |
| 870 | CAGAA | PBS |
| 871 | CAGAAA | PBS |
| 872 | CAGAAAG | PBS |
| 873 | CAGAAAGC | PBS |
| 874 | CAGAAAGCT | PBS |
| 875 | CAGAAAGCTT (SEQ ID NO: 875) | PBS |
| 876 | CAGAAAGCTTC (SEQ ID NO: 876) | PBS |
| 877 | CAGAAAGCTTCT (SEQ ID NO: 877) | PBS |
| 878 | CAGAAAGCTTCTG (SEQ ID NO: 878) | PBS |
| 879 | CAGAAAGCTTCTGC (SEQ ID NO: 879) | PBS |
| 880 | CAGAAAGCTTCTGCA (SEQ ID NO: 880) | PBS |
| 881 | CAGAAAGCTTCTGCAT (SEQ ID NO: 881) | PBS |
| 882 | CAGAAAGCTTCTGCATC (SEQ ID NO: 882) | PBS |
| 883 | CAGAAAGCTTCTGCATCC (SEQ ID NO: 883) | PBS |
| 884 | CAGAAAGCTTCTGCATCCA (SEQ ID NO: 884) | PBS |
| 885 | TGATCCCATA (SEQ ID NO: 885) | RTT |
| 886 | CTGATCCCATA (SEQ ID NO: 886) | RTT |
| 887 | CCTGATCCCATA (SEQ ID NO: 887) | RTT |
| 888 | GCCTGATCCCATA (SEQ ID NO: 888) | RTT |
| 889 | AGCCTGATCCCATA (SEQ ID NO: 889) | RTT |
| 890 | AAGCCTGATCCCATA (SEQ ID NO: 890) | RTT |
| 891 | GAAGCCTGATCCCATA (SEQ ID NO: 891) | RTT |
| 892 | GGAAGCCTGATCCCATA (SEQ ID NO: 892) | RTT |
| 893 | TGGAAGCCTGATCCCATA (SEQ ID NO: 893) | RTT |
| 894 | GTGGAAGCCTGATCCCATA (SEQ ID NO: 894) | RTT |
| 481 | AGTGGAAGCCTGATCCCATA (SEQ ID NO: 481) | RTT |
| 895 | AAGTGGAAGCCTGATCCCATA (SEQ ID NO: 895) | RTT |
| 896 | AAAGTGGAAGCCTGATCCCATA (SEQ ID NO: 896) | RTT |
| 897 | CAAAGTGGAAGCCTGATCCCATA (SEQ ID NO: | RTT |
| | 897) | |
| 898 | CCAAAGTGGAAGCCTGATCCCATA (SEQ ID NO: | RTT |
| | 898) | |
| 899 | TCCAAAGTGGAAGCCTGATCCCATA (SEQ ID NO: | RTT |
| | 899) | |
| 900 | TTCCAAAGTGGAAGCCTGATCCCATA (SEQ ID | RTT |
| | NO: 900) | |
| 901 | TTTCCAAAGTGGAAGCCTGATCCCATA (SEQ ID | RTT |
| | NO: 901) | |
| 902 | GTTTCCAAAGTGGAAGCCTGATCCCATA (SEQ ID | RTT |
| | NO: 902) | |
| 903 | GGTTTCCAAAGTGGAAGCCTGATCCCATA (SEQ | RTT |
| | ID NO: 903) | |
| 904 | GGGTTTCCAAAGTGGAAGCCTGATCCCATA (SEQ | RTT |
| | ID NO: 904) | |
| 905 | TGGGTTTCCAAAGTGGAAGCCTGATCCCATA | RTT |
| | (SEQ ID NO: 905) | |
| 906 | CTGGGTTTCCAAAGTGGAAGCCTGATCCCATA | RTT |
| | (SEQ ID NO: 906) | |
| 907 | GCTGGGTTTCCAAAGTGGAAGCCTGATCCCATA | RTT |
| | (SEQ ID NO: 907) | |
| 908 | TGCTGGGTTTCCAAAGTGGAAGCCTGATCCCATA | RTT |
| | (SEQ ID NO: 908) | |
| 909 | TTGCTGGGTTTCCAAAGTGGAAGCCTGATCCCAT | RTT |
| | A (SEQ ID NO: 909) | |
| 910 | CTTGCTGGGTTTCCAAAGTGGAAGCCTGATCCCA | RTT |
| | TA (SEQ ID NO: 910) | |
| 911 | TCTTGCTGGGTTTCCAAAGTGGAAGCCTGATCCC | RTT |
| | ATA (SEQ ID NO: 911) | |
| 912 | GTCTTGCTGGGTTTCCAAAGTGGAAGCCTGATCC | RTT |
| | CATA (SEQ ID NO: 912) | |
| 913 | TGTCTTGCTGGGTTTCCAAAGTGGAAGCCTGATC | RTT |
| | CCATA (SEQ ID NO: 913) | |
| 914 | GTGTCTTGCTGGGTTTCCAAAGTGGAAGCCTGAT | RTT |
| | CCCATA (SEQ ID NO: 914) | |
| 4 | AACTGAGCCACGTGAAGACA (SEQ ID NO: 4) | PE3 ngRNA spacer (GG PAM) |
| 195 | ACATCTTCCTTAGGAACTCC (SEQ ID NO: 195) | PE3 ngRNA spacer (TG PAM) |
| 196 | ACTACTTACCATCTCTTTCA (SEQ ID NO: 196) | PE3 ngRNA spacer (AG PAM) |
| 197 | ACTCCTGGAACTGAGCCACG (SEQ ID NO: 197) | PE3 ngRNA spacer (TG; TGA PAM) |
| 199 | AGGCTTCATACATCTTCCTT (SEQ ID NO: 199) | PE3 ngRNA spacer (AG PAM) |
| 200 | CATCTTCCTTAGGAACTCCT (SEQ ID NO: 200) | PE3 ngRNA spacer (GG; GGA PAM) |
| 201 | CCACGTGAAGACAGGTGTCT (SEQ ID NO: 201) | PE3 ngRNA spacer (TG PAM) |
| 202 | CCTGGAACTGAGCCACGTGA (SEQ ID NO: 202) | PE3 ngRNA spacer (AG; AGA PAM) |
| 203 | CGTGAAGACAGGTGTCTTGC (SEQ ID NO: 203) | PE3 ngRNA spacer (TG PAM) |
| 204 | CTACTTACCATCTCTTTCAA (SEQ ID NO: 204) | PE3 ngRNA spacer (GG PAM) |
| 205 | CTGAGCCACGTGAAGACAGG (SEQ ID NO: 205) | PE3 ngRNA spacer (TG PAM) |
| 206 | CTTAGGAACTCCTGGAACTG (SEQ ID NO: 206) | PE3 ngRNA spacer (AG PAM) |
| 207 | GAAAATAATTTCATTATTCT (SEQ ID NO: 207) | PE3 ngRNA spacer (GG PAM) |
| 208 | GAACTCCTGGAACTGAGCCA (SEQ ID NO: 208) | PE3 ngRNA spacer (CG PAM) |
| 209 | GAACTGAGCCACGTGAAGAC (SEQ ID NO: 209) | PE3 ngRNA spacer (AG PAM) |
| 210 | GGCTTCATACATCTTCCTTA (SEQ ID NO: 210) | PE3 ngRNA spacer (GG; GGA PAM) |
| 211 | GGGTTTCCAAAGTGGAAGCC (SEQ ID NO: 211) | PE3 ngRNA spacer (TG; TGA PAM) |
| 212 | GTCTTGCTGGGTTTCCAAAG (SEQ ID NO: 212) | PE3 ngRNA spacer (TG PAM) |
| 213 | GTGAAGACAGGTGTCTTGCT (SEQ ID NO: 213) | PE3 ngRNA spacer (GG PAM) |
| 384 | GTGGAAGCCTGATCCCATAC (SEQ ID NO: 384) | PE3b ngRNA spacer (AG; AGA PAM) |
| 214 | GTGTCTTGCTGGGTTTCCAA (SEQ ID NO: 214) | PE3 ngRNA spacer (AG PAM) |
| 215 | TCCTTAGGAACTCCTGGAAC (SEQ ID NO: 215) | PE3 ngRNA spacer (TG; TGA PAM) |
| 216 | TCTTGCTGGGTTTCCAAAGT (SEQ ID NO: 216) | PE3 ngRNA spacer (GG; GGA PAM) |
| 217 | TGAAGACAGGTGTCTTGCTG (SEQ ID NO: 217) | PE3 ngRNA spacer (GG PAM) |
| 218 | TGCTGGGTTTCCAAAGTGGA (SEQ ID NO: 218) | PE3 ngRNA spacer (AG PAM) |
| 323 | GTCTTGCTGGGTTTCCAAAGGTTTTAGAGCTAGA | PE3 ngRNA (TG PAM) |
| | AATAGCAAGTTAAAATAAGGCTAGTCCGTTATCA | |
| | ACTTGAAAAAGTGGCACCGAGTCGGTGC (SEQ ID | |
| | NO: 323) | |
| 324 | GTGAAGACAGGTGTCTTGCTGTTTTAGAGCTAGA | PE3 ngRNA (GG PAM) |
| | AATAGCAAGTTAAAATAAGGCTAGTCCGTTATCA | |
| | ACTTGAAAAAGTGGCACCGAGTCGGTGC (SEQ ID | |
| | NO: 324) | |
| 325 | CGTGAAGACAGGTGTCTTGCGTTTTAGAGCTAGA | PE3 ngRNA (TG PAM) |
| | AATAGCAAGTTAAAATAAGGCTAGTCCGTTATCA | |
| | ACTTGAAAAAGTGGCACCGAGTCGGTGC (SEQ ID | |
| | NO: 325) | |
| 326 | GAACTGAGCCACGTGAAGACGTTTTAGAGCTAG | PE3 ngRNA (AG PAM) |
| | AAATAGCAAGTTAAAATAAGGCTAGTCCGTTATC | |
| | AACTTGAAAAAGTGGCACCGAGTCGGTGC (SEQ | |
| | ID NO: 326) | |
| 327 | ACATCTTCCTTAGGAACTCCGTTTTAGAGCTAGA | PE3 ngRNA (TG PAM) |
| | AATAGCAAGTTAAAATAAGGCTAGTCCGTTATCA | |
| | ACTTGAAAAAGTGGCACCGAGTCGGTGC (SEQ ID | |
| | NO: 327) | |
| 328 | AGGCTTCATACATCTTCCTTGTTTTAGAGCTAGA | PE3 ngRNA (AG PAM) |
| | AATAGCAAGTTAAAATAAGGCTAGTCCGTTATCA | |
| | ACTTGAAAAAGTGGCACCGAGTCGGTGC (SEQ ID | |
| | NO: 328) | |
| 329 | ACTACTTACCATCTCTTTCAGTTTTAGAGCTAGA | PE3 ngRNA (AG PAM) |
| | AATAGCAAGTTAAAATAAGGCTAGTCCGTTATCA | |
| | ACTTGAAAAAGTGGCACCGAGTCGGTGC (SEQ ID | |
| | NO: 329) | |
| 330 | GTCTTGCTGGGTTTCCAAAGGTTTTAGAGCTAGA | PE3 ngRNA (TG PAM), contains end |
| | AATAGCAAGTTAAAATAAGGCTAGTCCGTTATCA | adaptations |
| | ACTTGAAAAAGTGGCACCGAGTCGGTGCTTTT | |
| | (SEQ ID NO: 330) | |
| 331 | GTGAAGACAGGTGTCTTGCTGTTTTAGAGCTAGA | PE3 ngRNA (GG PAM), contains end |
| | AATAGCAAGTTAAAATAAGGCTAGTCCGTTATCA | adaptations |
| | ACTTGAAAAAGTGGCACCGAGTCGGTGCTTTT | |
| | (SEQ ID NO: 331) | |
| 332 | GAACTGAGCCACGTGAAGACGTTTTAGAGCTAG | PE3 ngRNA (AG PAM), contains end |
| | AAATAGCAAGTTAAAATAAGGCTAGTCCGTTATC | adaptations |
| | AACTTGAAAAAGTGGCACCGAGTCGGTGCTTTT | |
| | (SEQ ID NO: 332) | |
| 333 | GCGTGAAGACAGGTGTCTTGCGTTTTAGAGCTAG | PE3 ngRNA (TG PAM), contains end |
| | AAATAGCAAGTTAAAATAAGGCTAGTCCGTTATC | adaptations |
| | AACTTGAAAAAGTGGCACCGAGTCGGTGCTTTT | |
| | (SEQ ID NO: 333) | |
| 334 | GACATCTTCCTTAGGAACTCCGTTTTAGAGCTAG | PE3 ngRNA (TG PAM), contains end |
| | AAATAGCAAGTTAAAATAAGGCTAGTCCGTTATC | adaptations |
| | AACTTGAAAAAGTGGCACCGAGTCGGTGCTTTT | |
| | (SEQ ID NO: 334) | |
| 335 | GAGGCTTCATACATCTTCCTTGTTTTAGAGCTAG | PE3 ngRNA (AG PAM), contains end |
| | AAATAGCAAGTTAAAATAAGGCTAGTCCGTTATC | adaptations |
| | AACTTGAAAAAGTGGCACCGAGTCGGTGCTTTT | |
| | (SEQ ID NO: 335) | |
| 336 | GACTACTTACCATCTCTTTCAGTTTTAGAGCTAG | PE3 ngRNA (AG PAM), contains end |
| | AAATAGCAAGTTAAAATAAGGCTAGTCCGTTATC | adaptations |
| | AACTTGAAAAAGTGGCACCGAGTCGGTGCTTTT | |
| | (SEQ ID NO: 336) | |
| 337 | GTCTTGCTGGGTTTCCAAAGGTTTTAGAGCTAGA | PE3 ngRNA (TG PAM), contains linker |
| | AATAGCAAGTTAAAATAAGGCTAGTCCGTTATCA | sequence AACATTGA; hairpin SEQ ID |
| | ACTTGAAAAAGTGGCACCGAGTCGGTGCAACAT | NO: 3591; end adaptations |
| | TGACGCGTCTCTACGTGGGGGCGCGTTTT (SEQ | |
| | ID NO: 337) | |
| 338 | GTGAAGACAGGTGTCTTGCTGTTTTAGAGCTAGA | PE3 ngRNA (GG PAM), contains linker |
| | AATAGCAAGTTAAAATAAGGCTAGTCCGTTATCA | sequence AACATTGA; hairpin SEQ ID |
| | ACTTGAAAAAGTGGCACCGAGTCGGTGCAACAT | NO: 3591; end adaptations |
| | TGACGCGTCTCTACGTGGGGGCGCGTTTT (SEQ | |
| | ID NO: 338) | |
| 339 | GAACTGAGCCACGTGAAGACGTTTTAGAGCTAG | PE3 ngRNA (AG PAM), contains linker |
| | AAATAGCAAGTTAAAATAAGGCTAGTCCGTTATC | sequence AACATTGA; hairpin SEQ ID |
| | AACTTGAAAAAGTGGCACCGAGTCGGTGCAACA | NO: 3591; end adaptations |
| | TTGACGCGTCTCTACGTGGGGGCGCGTTTT (SEQ | |
| | ID NO: 339) | |
| 340 | GCGTGAAGACAGGTGTCTTGCGTTTTAGAGCTAG | PE3 ngRNA (TG PAM), contains linker |
| | AAATAGCAAGTTAAAATAAGGCTAGTCCGTTATC | sequence AACATTGA; hairpin SEQ ID |
| | AACTTGAAAAAGTGGCACCGAGTCGGTGCAACA | NO: 3591; end adaptations |
| | TTGACGCGTCTCTACGTGGGGGCGCGTTTT (SEQ | |
| | ID NO: 340) | |
| 341 | GACATCTTCCTTAGGAACTCCGTTTTAGAGCTAG | PE3 ngRNA (TG PAM), contains linker |
| | AAATAGCAAGTTAAAATAAGGCTAGTCCGTTATC | sequence AACATTGA; hairpin SEQ ID |
| | AACTTGAAAAAGTGGCACCGAGTCGGTGCAACA | NO: 3591; end adaptations |
| | TTGACGCGTCTCTACGTGGGGGCGCGTTTT (SEQ | |
| | ID NO: 341) | |
| 342 | GAGGCTTCATACATCTTCCTTGTTTTAGAGCTAG | PE3 ngRNA (AG PAM), contains linker |
| | AAATAGCAAGTTAAAATAAGGCTAGTCCGTTATC | sequence AACATTGA; hairpin SEQ ID |
| | AACTTGAAAAAGTGGCACCGAGTCGGTGCAACA | NO: 3591; end adaptations |
| | TTGACGCGTCTCTACGTGGGGGCGCGTTTT (SEQ | |
| | ID NO: 342) | |
| 343 | GACTACTTACCATCTCTTTCAGTTTTAGAGCTAG | PE3 ngRNA (AG PAM), contains linker |
| | AAATAGCAAGTTAAAATAAGGCTAGTCCGTTATC | sequence AACATTGA; hairpin SEQ ID |
| | AACTTGAAAAAGTGGCACCGAGTCGGTGCAACA | NO: 3591; end adaptations |
| | TTGACGCGTCTCTACGTGGGGGCGCGTTTT (SEQ | |
| | ID NO: 343) | |

TABLE 15

| Sequence | | |
|---|---|---|
| Number | Sequence | Description |
| 915 | TGCAGAAGCTTTCTGTA (SEQ ID NO: 915) | PEgRNA spacer (TG; TGG PAM) |
| 916 | ATGCAGAAGCTTTCTGTA (SEQ ID NO: 916) | PEgRNA spacer (TG; TGG PAM) |
| 917 | GATGCAGAAGCTTTCTGTA (SEQ ID NO: 917) | PEgRNA spacer (TG; TGG PAM) |
| 35 | GGATGCAGAAGCTTTCTGTA (SEQ ID NO: 35) | PEgRNA spacer (TG; TGG PAM) |
| 918 | TGGATGCAGAAGCTTTCTGTA (SEQ ID NO: 918) | PEgRNA spacer (TG; TGG PAM) |
| 919 | TTGGATGCAGAAGCTTTCTGTA (SEQ ID NO: 919) | PEgRNA spacer (TG; TGG PAM) |
| 920 | AGAAA | PBS |
| 921 | AGAAAG | PBS |
| 922 | AGAAAGC | PBS |
| 923 | AGAAAGCT | PBS |
| 924 | AGAAAGCTT | PBS |
| 925 | AGAAAGCTTC (SEQ ID NO: 925) | PBS |
| 926 | AGAAAGCTTCT (SEQ ID NO: 926) | PBS |
| 927 | AGAAAGCTTCTG (SEQ ID NO: 927) | PBS |
| 928 | AGAAAGCTTCTGC (SEQ ID NO: 928) | PBS |
| 929 | AGAAAGCTTCTGCA (SEQ ID NO: 929) | PBS |
| 930 | AGAAAGCTTCTGCAT (SEQ ID NO: 930) | PBS |
| 931 | AGAAAGCTTCTGCATC (SEQ ID NO: 931) | PBS |
| 932 | AGAAAGCTTCTGCATCC (SEQ ID NO: 932) | PBS |
| 933 | AGAAAGCTTCTGCATCCA (SEQ ID NO: 933) | PBS |
| 934 | AGAAAGCTTCTGCATCCAA (SEQ ID NO: 934) | PBS |
| 935 | GATCCCATAC (SEQ ID NO: 935) | RTT |
| 936 | TGATCCCATAC (SEQ ID NO: 936) | RTT |
| 937 | CTGATCCCATAC (SEQ ID NO: 937) | RTT |
| 938 | CCTGATCCCATAC (SEQ ID NO: 938) | RTT |
| 939 | GCCTGATCCCATAC (SEQ ID NO: 939) | RTT |
| 940 | AGCCTGATCCCATAC (SEQ ID NO: 940) | RTT |
| 941 | AAGCCTGATCCCATAC (SEQ ID NO: 941) | RTT |
| 942 | GAAGCCTGATCCCATAC (SEQ ID NO: 942) | RTT |
| 943 | GGAAGCCTGATCCCATAC (SEQ ID NO: 943) | RTT |
| 944 | TGGAAGCCTGATCCCATAC (SEQ ID NO: 944) | RTT |
| 384 | GTGGAAGCCTGATCCCATAC (SEQ ID NO: 384) | RTT |
| 945 | AGTGGAAGCCTGATCCCATAC (SEQ ID NO: 945) | RTT |
| 946 | AAGTGGAAGCCTGATCCCATAC (SEQ ID NO: 946) | RTT |
| 947 | AAAGTGGAAGCCTGATCCCATAC (SEQ ID NO: | RTT |
| | 947) | |
| 948 | CAAAGTGGAAGCCTGATCCCATAC (SEQ ID NO: | RTT |
| | 948) | |
| 949 | CCAAAGTGGAAGCCTGATCCCATAC (SEQ ID NO: | RTT |
| | 949) | |
| 950 | TCCAAAGTGGAAGCCTGATCCCATAC (SEQ ID | RTT |
| | NO: 950) | |
| 951 | TTCCAAAGTGGAAGCCTGATCCCATAC (SEQ ID | RTT |
| | NO: 951) | |
| 952 | TTTCCAAAGTGGAAGCCTGATCCCATAC (SEQ ID | RTT |
| | NO: 952) | |
| 953 | GTTTCCAAAGTGGAAGCCTGATCCCATAC (SEQ | RTT |
| | ID NO: 953) | |
| 954 | GGTTTCCAAAGTGGAAGCCTGATCCCATAC (SEQ | RTT |
| | ID NO: 954) | |
| 955 | GGGTTTCCAAAGTGGAAGCCTGATCCCATAC | RTT |
| | (SEQ ID NO: 955) | |
| 956 | TGGGTTTCCAAAGTGGAAGCCTGATCCCATAC | RTT |
| | (SEQ ID NO: 956) | |
| 957 | CTGGGTTTCCAAAGTGGAAGCCTGATCCCATAC | RTT |
| | (SEQ ID NO: 957) | |
| 958 | GCTGGGTTTCCAAAGTGGAAGCCTGATCCCATAC | RTT |
| | (SEQ ID NO: 958) | |
| 959 | TGCTGGGTTTCCAAAGTGGAAGCCTGATCCCATA | RTT |
| | C (SEQ ID NO: 959) | |
| 960 | TTGCTGGGTTTCCAAAGTGGAAGCCTGATCCCAT | RTT |
| | AC (SEQ ID NO: 960) | |
| 961 | CTTGCTGGGTTTCCAAAGTGGAAGCCTGATCCCA | RTT |
| | TAC (SEQ ID NO: 961) | |
| 962 | TCTTGCTGGGTTTCCAAAGTGGAAGCCTGATCCC | RTT |
| | ATAC (SEQ ID NO: 962) | |
| 963 | GTCTTGCTGGGTTTCCAAAGTGGAAGCCTGATCC | RTT |
| | CATAC (SEQ ID NO: 963) | |
| 964 | TGTCTTGCTGGGTTTCCAAAGTGGAAGCCTGATC | RTT |
| | CCATAC (SEQ ID NO: 964) | |
| 4 | AACTGAGCCACGTGAAGACA (SEQ ID NO: 4) | PE3 ngRNA spacer (GG PAM) |
| 195 | ACATCTTCCTTAGGAACTCC (SEQ ID NO: 195) | PE3 ngRNA spacer (TG; TGG PAM) |
| 196 | ACTACTTACCATCTCTTTCA (SEQ ID NO: 196) | PE3 ngRNA spacer (AG; AGG PAM) |
| 197 | ACTCCTGGAACTGAGCCACG (SEQ ID NO: 197) | PE3 ngRNA spacer (TG PAM) |
| 199 | AGGCTTCATACATCTTCCTT (SEQ ID NO: 199) | PE3 ngRNA spacer (AG; AGG PAM) |
| 200 | CATCTTCCTTAGGAACTCCT (SEQ ID NO: 200) | PE3 ngRNA spacer (GG PAM) |
| 201 | CCACGTGAAGACAGGTGTCT (SEQ ID NO: 201) | PE3 ngRNA spacer (TG PAM) |
| 202 | CCTGGAACTGAGCCACGTGA (SEQ ID NO: 202) | PE3 ngRNA spacer (AG PAM) |
| 203 | CGTGAAGACAGGTGTCTTGC (SEQ ID NO: 203) | PE3 ngRNA spacer (TG; TGG PAM) |
| 204 | CTACTTACCATCTCTTTCAA (SEQ ID NO: 204) | PE3 ngRNA spacer (GG PAM) |
| 205 | CTGAGCCACGTGAAGACAGG (SEQ ID NO: 205) | PE3 ngRNA spacer (TG PAM) |
| 206 | CTTAGGAACTCCTGGAACTG (SEQ ID NO: 206) | PE3 ngRNA spacer (AG PAM) |
| 208 | GAACTCCTGGAACTGAGCCA (SEQ ID NO: 208) | PE3 ngRNA spacer (CG PAM) |
| 209 | GAACTGAGCCACGTGAAGAC (SEQ ID NO: 209) | PE3 ngRNA spacer (AG; AGG PAM) |
| 210 | GGCTTCATACATCTTCCTTA (SEQ ID NO: 210) | PE3 ngRNA spacer (GG PAM) |
| 211 | GGGTTTCCAAAGTGGAAGCC (SEQ ID NO: 211) | PE3 ngRNA spacer (TG PAM) |
| 212 | GTCTTGCTGGGTTTCCAAAG (SEQ ID NO: 212) | PE3 ngRNA spacer (TG; TGG PAM) |
| 213 | GTGAAGACAGGTGTCTTGCT (SEQ ID NO: 213) | PE3 ngRNA spacer (GG; GGG PAM) |
| 384 | GTGGAAGCCTGATCCCATAC (SEQ ID NO: 384) | PE3b ngRNA spacer (AG PAM) |
| 214 | GTGTCTTGCTGGGTTTCCAA (SEQ ID NO: 214) | PE3 ngRNA spacer (AG PAM) |
| 215 | TCCTTAGGAACTCCTGGAAC (SEQ ID NO: 215) | PE3 ngRNA spacer (TG PAM) |
| 216 | TCTTGCTGGGTTTCCAAAGT (SEQ ID NO: 216) | PE3 ngRNA spacer (GG PAM) |
| 217 | TGAAGACAGGTGTCTTGCTG (SEQ ID NO: 217) | PE3 ngRNA spacer (GG PAM) |
| 218 | TGCTGGGTTTCCAAAGTGGA (SEQ ID NO: 218) | PE3 ngRNA spacer (AG PAM) |
| 965 | GGATGCAGAAGCTTTCTGTAGTTTTAGAGCTAGA | pegRNA |
| | AATAGCAAGTTAAAATAAGGCTAGTCCGTTATCA | |
| | ACTTGAAAAAGTGGCACCGAGTCGGTGCTGATC | |
| | CCATACAGAAAGCT (SEQ ID NO: 965) | |
| 966 | GGATGCAGAAGCTTTCTGTAGTTTTAGAGCTAGA | pegRNA |
| | AATAGCAAGTTAAAATAAGGCTAGTCCGTTATCA | |
| | ACTTGAAAAAGTGGCACCGAGTCGGTGCTGATC | |
| | CCATACAGAAAGCTTC (SEQ ID NO: 966) | |
| 967 | GGATGCAGAAGCTTTCTGTAGTTTTAGAGCTAGA | pegRNA |
| | AATAGCAAGTTAAAATAAGGCTAGTCCGTTATCA | |
| | ACTTGAAAAAGTGGCACCGAGTCGGTGCGCCTG | |
| | ATCCCATACAGAAAGCT (SEQ ID NO: 967) | |
| 968 | GGATGCAGAAGCTTTCTGTAGTTTTAGAGCTAGA | pegRNA |
| | AATAGCAAGTTAAAATAAGGCTAGTCCGTTATCA | |
| | ACTTGAAAAAGTGGCACCGAGTCGGTGCTGATC | |
| | CCATACAGAAAGCTTCTG (SEQ ID NO: 968) | |
| 969 | GGATGCAGAAGCTTTCTGTAGTTTTAGAGCTAGA | pegRNA, contains 3′ TTTT |
| | AATAGCAAGTTAAAATAAGGCTAGTCCGTTATCA | |
| | ACTTGAAAAAGTGGCACCGAGTCGGTGCTGATC | |
| | CCATACAGAAAGCTTTTT (SEQ ID NO: 969) | |
| 970 | GGATGCAGAAGCTTTCTGTAGTTTTAGAGCTAGA | pegRNA |
| | AATAGCAAGTTAAAATAAGGCTAGTCCGTTATCA | |
| | ACTTGAAAAAGTGGCACCGAGTCGGTGCGCCTG | |
| | ATCCCATACAGAAAGCTTC (SEQ ID NO: 970) | |
| 971 | GGATGCAGAAGCTTTCTGTAGTTTTAGAGCTAGA | pegRNA |
| | AATAGCAAGTTAAAATAAGGCTAGTCCGTTATCA | |
| | ACTTGAAAAAGTGGCACCGAGTCGGTGCAAGCC | |
| | TGATCCCATACAGAAAGCT (SEQ ID NO: 971) | |
| 972 | GGATGCAGAAGCTTTCTGTAGTTTTAGAGCTAGA | pegRNA |
| | AATAGCAAGTTAAAATAAGGCTAGTCCGTTATCA | |
| | ACTTGAAAAAGTGGCACCGAGTCGGTGCTGATC | |
| | CCATACAGAAAGCTTCTGCA (SEQ ID NO: 972) | |
| 973 | GGATGCAGAAGCTTTCTGTAGTTTTAGAGCTAGA | pegRNA, contains 3′ TTTT |
| | AATAGCAAGTTAAAATAAGGCTAGTCCGTTATCA | |
| | ACTTGAAAAAGTGGCACCGAGTCGGTGCTGATC | |
| | CCATACAGAAAGCTTCTTTT (SEQ ID NO: 973) | |
| 974 | GGATGCAGAAGCTTTCTGTAGTTTTAGAGCTAGA | pegRNA |
| | AATAGCAAGTTAAAATAAGGCTAGTCCGTTATCA | |
| | ACTTGAAAAAGTGGCACCGAGTCGGTGCGCCTG | |
| | ATCCCATACAGAAAGCTTCTG (SEQ ID NO: 974) | |
| 975 | GGATGCAGAAGCTTTCTGTAGTTTTAGAGCTAGA | pegRNA |
| | AATAGCAAGTTAAAATAAGGCTAGTCCGTTATCA | |
| | ACTTGAAAAAGTGGCACCGAGTCGGTGCAAGCC | |
| | TGATCCCATACAGAAAGCTTC (SEQ ID NO: 975) | |
| 976 | GGATGCAGAAGCTTTCTGTAGTTTTAGAGCTAGA | pegRNA |
| | AATAGCAAGTTAAAATAAGGCTAGTCCGTTATCA | |
| | ACTTGAAAAAGTGGCACCGAGTCGGTGCGGAAG | |
| | CCTGATCCCATACAGAAAGCT (SEQ ID NO: 976) | |
| 977 | GGATGCAGAAGCTTTCTGTAGTTTTAGAGCTAGA | pegRNA, contains 3′ TTTT |
| | AATAGCAAGTTAAAATAAGGCTAGTCCGTTATCA | |
| | ACTTGAAAAAGTGGCACCGAGTCGGTGCGCCTG | |
| | ATCCCATACAGAAAGCTTTTT (SEQ ID NO: 977) | |
| 978 | GGATGCAGAAGCTTTCTGTAGTTTTAGAGCTAGA | pegRNA, contains 3′ TTTT |
| | AATAGCAAGTTAAAATAAGGCTAGTCCGTTATCA | |
| | ACTTGAAAAAGTGGCACCGAGTCGGTGCTGATC | |
| | CCATACAGAAAGCTTCTGTTTT (SEQ ID NO: 978) | |
| 979 | GGATGCAGAAGCTTTCTGTAGTTTTAGAGCTAGA | pegRNA |
| | AATAGCAAGTTAAAATAAGGCTAGTCCGTTATCA | |
| | ACTTGAAAAAGTGGCACCGAGTCGGTGCGCCTG | |
| | ATCCCATACAGAAAGCTTCTGCA (SEQ ID NO: | |
| | 979) | |
| 980 | GGATGCAGAAGCTTTCTGTAGTTTTAGAGCTAGA | pegRNA |
| | AATAGCAAGTTAAAATAAGGCTAGTCCGTTATCA | |
| | ACTTGAAAAAGTGGCACCGAGTCGGTGCAAGCC | |
| | TGATCCCATACAGAAAGCTTCTG (SEQ ID NO: | |
| | 980) | |
| 981 | GGATGCAGAAGCTTTCTGTAGTTTTAGAGCTAGA | pegRNA |
| | AATAGCAAGTTAAAATAAGGCTAGTCCGTTATCA | |
| | ACTTGAAAAAGTGGCACCGAGTCGGTGCGGAAG | |
| | CCTGATCCCATACAGAAAGCTTC (SEQ ID NO: | |
| | 981) | |
| 982 | GGATGCAGAAGCTTTCTGTAGTTTTAGAGCTAGA | pegRNA |
| | AATAGCAAGTTAAAATAAGGCTAGTCCGTTATCA | |
| | ACTTGAAAAAGTGGCACCGAGTCGGTGCGTGGA | |
| | AGCCTGATCCCATACAGAAAGCT (SEQ ID NO: | |
| | 982) | |
| 983 | GGATGCAGAAGCTTTCTGTAGTTTTAGAGCTAGA | pegRNA, contains 3′ TTTT |
| | AATAGCAAGTTAAAATAAGGCTAGTCCGTTATCA | |
| | ACTTGAAAAAGTGGCACCGAGTCGGTGCGCCTG | |
| | ATCCCATACAGAAAGCTTCTTTT (SEQ ID | |
| | NO: 983) | |
| 984 | GGATGCAGAAGCTTTCTGTAGTTTTAGAGCTAGA | pegRNA, contains 3′ TTTT |
| | AATAGCAAGTTAAAATAAGGCTAGTCCGTTATCA | |
| | ACTTGAAAAAGTGGCACCGAGTCGGTGCAAGCC | |
| | TGATCCCATACAGAAAGCTTTTT (SEQ ID | |
| | NO: 984) | |
| 985 | GGATGCAGAAGCTTTCTGTAGTTTTAGAGCTAGA | pegRNA, contains 3′ TTTT |
| | AATAGCAAGTTAAAATAAGGCTAGTCCGTTATCA | |
| | ACTTGAAAAAGTGGCACCGAGTCGGTGCTGATC | |
| | CCATACAGAAAGCTTCTGCATTTT (SEQ ID NO: | |
| | 985) | |
| 986 | GGATGCAGAAGCTTTCTGTAGTTTTAGAGCTAGA | pegRNA |
| | AATAGCAAGTTAAAATAAGGCTAGTCCGTTATCA | |
| | ACTTGAAAAAGTGGCACCGAGTCGGTGCAAGCC | |
| | TGATCCCATACAGAAAGCTTCTGCA (SEQ ID NO: | |
| | 986) | |
| 987 | GGATGCAGAAGCTTTCTGTAGTTTTAGAGCTAGA | pegRNA |
| | AATAGCAAGTTAAAATAAGGCTAGTCCGTTATCA | |
| | ACTTGAAAAAGTGGCACCGAGTCGGTGCGGAAG | |
| | CCTGATCCCATACAGAAAGCTTCTG (SEQ ID NO: | |
| | 987) | |
| 988 | GGATGCAGAAGCTTTCTGTAGTTTTAGAGCTAGA | pegRNA |
| | AATAGCAAGTTAAAATAAGGCTAGTCCGTTATCA | |
| | ACTTGAAAAAGTGGCACCGAGTCGGTGCGTGGA | |
| | AGCCTGATCCCATACAGAAAGCTTC (SEQ ID NO: | |
| | 988) | |
| 989 | GGATGCAGAAGCTTTCTGTAGTTTTAGAGCTAGA | pegRNA, contains 3′ TTTT |
| | AATAGCAAGTTAAAATAAGGCTAGTCCGTTATCA | |
| | ACTTGAAAAAGTGGCACCGAGTCGGTGCGCCTG | |
| | ATCCCATACAGAAAGCTTCTGTTTT (SEQ ID NO: | |
| | 989) | |
| 990 | GGATGCAGAAGCTTTCTGTAGTTTTAGAGCTAGA | pegRNA, contains 3′ TTTT |
| | AATAGCAAGTTAAAATAAGGCTAGTCCGTTATCA | |
| | ACTTGAAAAAGTGGCACCGAGTCGGTGCAAGCC | |
| | TGATCCCATACAGAAAGCTTCTTTT (SEQ ID NO: | |
| | 990) | |
| 991 | GGATGCAGAAGCTTTCTGTAGTTTTAGAGCTAGA | pegRNA, contains 3′ TTTT |
| | AATAGCAAGTTAAAATAAGGCTAGTCCGTTATCA | |
| | ACTTGAAAAAGTGGCACCGAGTCGGTGCGGAAG | |
| | CCTGATCCCATACAGAAAGCTTTTT (SEQ ID NO: | |
| | 991) | |
| 992 | GGATGCAGAAGCTTTCTGTAGTTTTAGAGCTAGA | pegRNA |
| | AATAGCAAGTTAAAATAAGGCTAGTCCGTTATCA | |
| | ACTTGAAAAAGTGGCACCGAGTCGGTGCGGAAG | |
| | CCTGATCCCATACAGAAAGCTTCTGCA (SEQ ID | |
| | NO: 992) | |
| 993 | GGATGCAGAAGCTTTCTGTAGTTTTAGAGCTAGA | pegRNA |
| | AATAGCAAGTTAAAATAAGGCTAGTCCGTTATCA | |
| | ACTTGAAAAAGTGGCACCGAGTCGGTGCGTGGA | |
| | AGCCTGATCCCATACAGAAAGCTTCTG (SEQ ID | |
| | NO: 993) | |
| 994 | GGATGCAGAAGCTTTCTGTAGTTTTAGAGCTAGA | pegRNA, contains 3′ TTTT |
| | AATAGCAAGTTAAAATAAGGCTAGTCCGTTATCA | |
| | ACTTGAAAAAGTGGCACCGAGTCGGTGCGCCTG | |
| | ATCCCATACAGAAAGCTTCTGCATTTT (SEQ ID | |
| | NO: 994) | |
| 995 | GGATGCAGAAGCTTTCTGTAGTTTTAGAGCTAGA | pegRNA, contains 3′ TTTT |
| | AATAGCAAGTTAAAATAAGGCTAGTCCGTTATCA | |
| | ACTTGAAAAAGTGGCACCGAGTCGGTGCAAGCC | |
| | TGATCCCATACAGAAAGCTTCTGTTTT (SEQ ID | |
| | NO: 995) | |
| 996 | GGATGCAGAAGCTTTCTGTAGTTTTAGAGCTAGA | pegRNA, contains 3′ TTTT |
| | AATAGCAAGTTAAAATAAGGCTAGTCCGTTATCA | |
| | ACTTGAAAAAGTGGCACCGAGTCGGTGCGGAAG | |
| | CCTGATCCCATACAGAAAGCTTCTTTT (SEQ ID | |
| | NO: 996) | |
| 997 | GGATGCAGAAGCTTTCTGTAGTTTTAGAGCTAGA | pegRNA, contains 3′ TTTT |
| | AATAGCAAGTTAAAATAAGGCTAGTCCGTTATCA | |
| | ACTTGAAAAAGTGGCACCGAGTCGGTGCGTGGA | |
| | AGCCTGATCCCATACAGAAAGCTTTTT (SEQ ID | |
| | NO: 997) | |
| 998 | GGATGCAGAAGCTTTCTGTAGTTTTAGAGCTAGA | pegRNA |
| | AATAGCAAGTTAAAATAAGGCTAGTCCGTTATCA | |
| | ACTTGAAAAAGTGGCACCGAGTCGGTGCGTGGA | |
| | AGCCTGATCCCATACAGAAAGCTTCTGCA (SEQ | |
| | ID NO: 998) | |
| 999 | GGATGCAGAAGCTTTCTGTAGTTTTAGAGCTAGA | pegRNA, contains 3′ TTTT |
| | AATAGCAAGTTAAAATAAGGCTAGTCCGTTATCA | |
| | ACTTGAAAAAGTGGCACCGAGTCGGTGCAAGCC | |
| | TGATCCCATACAGAAAGCTTCTGCATTTT (SEQ ID | |
| | NO: 999) | |
| 1000 | GGATGCAGAAGCTTTCTGTAGTTTTAGAGCTAGA | pegRNA, contains 3′ TTTT |
| | AATAGCAAGTTAAAATAAGGCTAGTCCGTTATCA | |
| | ACTTGAAAAAGTGGCACCGAGTCGGTGCGGAAG | |
| | CCTGATCCCATACAGAAAGCTTCTGTTTT (SEQ ID | |
| | NO: 1000) | |
| 1001 | GGATGCAGAAGCTTTCTGTAGTTTTAGAGCTAGA | pegRNA, contains 3′ TTTT |
| | AATAGCAAGTTAAAATAAGGCTAGTCCGTTATCA | |
| | ACTTGAAAAAGTGGCACCGAGTCGGTGCGTGGA | |
| | AGCCTGATCCCATACAGAAAGCTTCTTTT (SEQ ID | |
| | NO: 1001) | |
| 1002 | GGATGCAGAAGCTTTCTGTAGTTTTAGAGCTAGA | pegRNA, contains 3′ TTTT |
| | AATAGCAAGTTAAAATAAGGCTAGTCCGTTATCA | |
| | ACTTGAAAAAGTGGCACCGAGTCGGTGCGGAAG | |
| | CCTGATCCCATACAGAAAGCTTCTGCATTTT (SEQ | |
| | ID NO: 1002) | |
| 1003 | GGATGCAGAAGCTTTCTGTAGTTTTAGAGCTAGA | pegRNA, contains 3′ TTTT |
| | AATAGCAAGTTAAAATAAGGCTAGTCCGTTATCA | |
| | ACTTGAAAAAGTGGCACCGAGTCGGTGCGTGGA | |
| | AGCCTGATCCCATACAGAAAGCTTCTGTTTT | |
| | (SEQ ID NO: 1003) | |
| 1004 | GGATGCAGAAGCTTTCTGTAGTTTTAGAGCTAGA | pegRNA, contains 3′ TTTT |
| | AATAGCAAGTTAAAATAAGGCTAGTCCGTTATCA | |
| | ACTTGAAAAAGTGGCACCGAGTCGGTGCGTGGA | |
| | AGCCTGATCCCATACAGAAAGCTTCTGCATTTT | |
| | (SEQ ID NO: 1004) | |
| 1005 | GGATGCAGAAGCTTTCTGTAGTTTTAGAGCTAGA | pegRNA, contains linker sequence |
| | AATAGCAAGTTAAAATAAGGCTAGTCCGTTATCA | AACATTGA; hairpin SEQ ID NO: 3591; 3′ |
| | ACTTGAAAAAGTGGCACCGAGTCGGTGCTGATC | TTTT |
| | CCATACAGAAAGCTAACATTGACGCGTCTCTACG | |
| | TGGGGGCGCGTTTT (SEQ ID NO: 1005) | |
| 1006 | GGATGCAGAAGCTTTCTGTAGTTTTAGAGCTAGA | pegRNA, contains linker sequence |
| | AATAGCAAGTTAAAATAAGGCTAGTCCGTTATCA | AACATTGA; hairpin SEQ ID NO: 3591; 3′ |
| | ACTTGAAAAAGTGGCACCGAGTCGGTGCTGATC | TTTT |
| | CCATACAGAAAGCTTCAACATTGACGCGTCTCTA | |
| | CGTGGGGGCGCGTTTT (SEQ ID NO: 1006) | |
| 1007 | GGATGCAGAAGCTTTCTGTAGTTTTAGAGCTAGA | pegRNA, contains linker sequence |
| | AATAGCAAGTTAAAATAAGGCTAGTCCGTTATCA | AACATTGA; hairpin SEQ ID NO: 3591; 3′ |
| | ACTTGAAAAAGTGGCACCGAGTCGGTGCGCCTG | TTTT |
| | ATCCCATACAGAAAGCTAACATTGACGCGTCTCT | |
| | ACGTGGGGGCGCGTTTT (SEQ ID NO: 1007) | |
| 1008 | GGATGCAGAAGCTTTCTGTAGTTTTAGAGCTAGA | pegRNA, contains linker sequence |
| | AATAGCAAGTTAAAATAAGGCTAGTCCGTTATCA | AACATTGA; hairpin SEQ ID NO: 3591; 3′ |
| | ACTTGAAAAAGTGGCACCGAGTCGGTGCTGATC | TTTT |
| | CCATACAGAAAGCTTCTGAACATTGACGCGTCTC | |
| | TACGTGGGGGCGCGTTTT (SEQ ID NO: 1008) | |
| 1009 | GGATGCAGAAGCTTTCTGTAGTTTTAGAGCTAGA | pegRNA, contains linker sequence |
| | AATAGCAAGTTAAAATAAGGCTAGTCCGTTATCA | AACATTGA; hairpin SEQ ID NO: 3591; 3′ |
| | ACTTGAAAAAGTGGCACCGAGTCGGTGCGCCTG | TTTT |
| | ATCCCATACAGAAAGCTTCAACATTGACGCGTCT | |
| | CTACGTGGGGGCGCGTTTT (SEQ ID NO: 1009) | |
| 1010 | GGATGCAGAAGCTTTCTGTAGTTTTAGAGCTAGA | pegRNA, contains linker sequence |
| | AATAGCAAGTTAAAATAAGGCTAGTCCGTTATCA | AACATTGA; hairpin SEQ ID NO: 3591; 3′ |
| | ACTTGAAAAAGTGGCACCGAGTCGGTGCAAGCC | TTTT |
| | TGATCCCATACAGAAAGCTAACATTGACGCGTCT | |
| | CTACGTGGGGGCGCGTTTT (SEQ ID NO: 1010) | |
| 1011 | GGATGCAGAAGCTTTCTGTAGTTTTAGAGCTAGA | pegRNA, contains linker sequence |
| | AATAGCAAGTTAAAATAAGGCTAGTCCGTTATCA | AACATTGA; hairpin SEQ ID NO: 3591; 3′ |
| | ACTTGAAAAAGTGGCACCGAGTCGGTGCTGATC | TTTT |
| | CCATACAGAAAGCTTCTGCAAACATTGACGCGTC | |
| | TCTACGTGGGGGCGCGTTTT (SEQ ID NO: 1011) | |
| 1012 | GGATGCAGAAGCTTTCTGTAGTTTTAGAGCTAGA | pegRNA, contains linker sequence |
| | AATAGCAAGTTAAAATAAGGCTAGTCCGTTATCA | AACATTGA; hairpin SEQ ID NO: 3591; 3′ |
| | ACTTGAAAAAGTGGCACCGAGTCGGTGCGCCTG | TTTT |
| | ATCCCATACAGAAAGCTTCTGAACATTGACGCGT | |
| | CTCTACGTGGGGGCGCGTTTT (SEQ ID NO: 1012) | |
| 1013 | GGATGCAGAAGCTTTCTGTAGTTTTAGAGCTAGA | pegRNA, contains linker sequence |
| | AATAGCAAGTTAAAATAAGGCTAGTCCGTTATCA | AACATTGA; hairpin SEQ ID NO: 3591; 3′ |
| | ACTTGAAAAAGTGGCACCGAGTCGGTGCAAGCC | TTTT |
| | TGATCCCATACAGAAAGCTTCAACATTGACGCGT | |
| | CTCTACGTGGGGGCGCGTTTT (SEQ ID NO: 1013) | |
| 1014 | GGATGCAGAAGCTTTCTGTAGTTTTAGAGCTAGA | pegRNA, contains linker sequence |
| | AATAGCAAGTTAAAATAAGGCTAGTCCGTTATCA | AACATTGA; hairpin SEQ ID NO: 3591; 3′ |
| | ACTTGAAAAAGTGGCACCGAGTCGGTGCGGAAG | TTTT |
| | CCTGATCCCATACAGAAAGCTAACATTGACGCGT | |
| | CTCTACGTGGGGGCGCGTTTT (SEQ ID NO: 1014) | |
| 1015 | GGATGCAGAAGCTTTCTGTAGTTTTAGAGCTAGA | pegRNA, contains linker sequence |
| | AATAGCAAGTTAAAATAAGGCTAGTCCGTTATCA | AACATTGA; hairpin SEQ ID NO: 3591; 3′ |
| | ACTTGAAAAAGTGGCACCGAGTCGGTGCGCCTG | TTTT |
| | ATCCCATACAGAAAGCTTCTGCAAACATTGACGC | |
| | GTCTCTACGTGGGGGCGCGTTTT (SEQ ID NO: | |
| | 1015) | |
| 1016 | GGATGCAGAAGCTTTCTGTAGTTTTAGAGCTAGA | pegRNA, contains linker sequence |
| | AATAGCAAGTTAAAATAAGGCTAGTCCGTTATCA | AACATTGA; hairpin SEQ ID NO: 3591; 3′ |
| | ACTTGAAAAAGTGGCACCGAGTCGGTGCAAGCC | TTTT |
| | TGATCCCATACAGAAAGCTTCTGAACATTGACGC | |
| | GTCTCTACGTGGGGGCGCGTTTT (SEQ ID NO: | |
| | 1016) | |
| 1017 | GGATGCAGAAGCTTTCTGTAGTTTTAGAGCTAGA | pegRNA, contains linker sequence |
| | AATAGCAAGTTAAAATAAGGCTAGTCCGTTATCA | AACATTGA; hairpin SEQ ID NO: 3591; 3′ |
| | ACTTGAAAAAGTGGCACCGAGTCGGTGCGGAAG | TTTT |
| | CCTGATCCCATACAGAAAGCTTCAACATTGACGC | |
| | GTCTCTACGTGGGGGCGCGTTTT (SEQ ID NO: | |
| | 1017) | |
| 1018 | GGATGCAGAAGCTTTCTGTAGTTTTAGAGCTAGA | pegRNA, contains linker sequence |
| | AATAGCAAGTTAAAATAAGGCTAGTCCGTTATCA | AACATTGA; hairpin SEQ ID NO: 3591; 3′ |
| | ACTTGAAAAAGTGGCACCGAGTCGGTGCGTGGA | TTTT |
| | AGCCTGATCCCATACAGAAAGCTAACATTGACG | |
| | CGTCTCTACGTGGGGGCGCGTTTT (SEQ ID NO: | |
| | 1018) | |
| 1019 | GGATGCAGAAGCTTTCTGTAGTTTTAGAGCTAGA | pegRNA, contains linker sequence |
| | AATAGCAAGTTAAAATAAGGCTAGTCCGTTATCA | AACATTGA; hairpin SEQ ID NO: 3591; 3′ |
| | ACTTGAAAAAGTGGCACCGAGTCGGTGCAAGCC | TTTT |
| | TGATCCCATACAGAAAGCTTCTGCAAACATTGAC | |
| | GCGTCTCTACGTGGGGGCGCGTTTT (SEQ ID NO: | |
| | 1019) | |
| 1020 | GGATGCAGAAGCTTTCTGTAGTTTTAGAGCTAGA | pegRNA, contains linker sequence |
| | AATAGCAAGTTAAAATAAGGCTAGTCCGTTATCA | AACATTGA; hairpin SEQ ID NO: 3591; 3′ |
| | ACTTGAAAAAGTGGCACCGAGTCGGTGCGGAAG | TTTT |
| | CCTGATCCCATACAGAAAGCTTCTGAACATTGAC | |
| | GCGTCTCTACGTGGGGGCGCGTTTT (SEQ ID NO: | |
| | 1020) | |
| 1021 | GGATGCAGAAGCTTTCTGTAGTTTTAGAGCTAGA | pegRNA, contains linker sequence |
| | AATAGCAAGTTAAAATAAGGCTAGTCCGTTATCA | AACATTGA; hairpin SEQ ID NO: 3591; 3′ |
| | ACTTGAAAAAGTGGCACCGAGTCGGTGCGTGGA | TTTT |
| | AGCCTGATCCCATACAGAAAGCTTCAACATTGAC | |
| | GCGTCTCTACGTGGGGGCGCGTTTT (SEQ ID NO: | |
| | 1021) | |
| 1022 | GGATGCAGAAGCTTTCTGTAGTTTTAGAGCTAGA | pegRNA, contains linker sequence |
| | AATAGCAAGTTAAAATAAGGCTAGTCCGTTATCA | AACATTGA; hairpin SEQ ID NO: 3591; 3′ |
| | ACTTGAAAAAGTGGCACCGAGTCGGTGCGGAAG | TTTT |
| | CCTGATCCCATACAGAAAGCTTCTGCAAACATTG | |
| | ACGCGTCTCTACGTGGGGGCGCGTTTT (SEQ ID | |
| | NO: 1022) | |
| 1023 | GGATGCAGAAGCTTTCTGTAGTTTTAGAGCTAGA | pegRNA, contains linker sequence |
| | AATAGCAAGTTAAAATAAGGCTAGTCCGTTATCA | AACATTGA; hairpin SEQ ID NO: 3591; 3′ |
| | ACTTGAAAAAGTGGCACCGAGTCGGTGCGTGGA | TTTT |
| | AGCCTGATCCCATACAGAAAGCTTCTGAACATTG | |
| | ACGCGTCTCTACGTGGGGGCGCGTTTT (SEQ ID | |
| | NO: 1023) | |
| 1024 | GGATGCAGAAGCTTTCTGTAGTTTTAGAGCTAGA | pegRNA, contains linker sequence |
| | AATAGCAAGTTAAAATAAGGCTAGTCCGTTATCA | AACATTGA; hairpin SEQ ID NO: 3591; 3′ |
| | ACTTGAAAAAGTGGCACCGAGTCGGTGCGTGGA | TTTT |
| | AGCCTGATCCCATACAGAAAGCTTCTGCAAACAT | |
| | TGACGCGTCTCTACGTGGGGGCGCGTTTT (SEQ | |
| | ID NO: 1024) | |
| 323 | GTCTTGCTGGGTTTCCAAAGGTTTTAGAGCTAGA | PE3 ngRNA (TG; TGG PAM) |
| | AATAGCAAGTTAAAATAAGGCTAGTCCGTTATCA | |
| | ACTTGAAAAAGTGGCACCGAGTCGGTGC (SEQ ID | |
| | NO: 323) | |
| 324 | GTGAAGACAGGTGTCTTGCTGTTTTAGAGCTAGA | PE3 ngRNA (GG; GGG PAM) |
| | AATAGCAAGTTAAAATAAGGCTAGTCCGTTATCA | |
| | ACTTGAAAAAGTGGCACCGAGTCGGTGC (SEQ ID | |
| | NO: 324) | |
| 325 | CGTGAAGACAGGTGTCTTGCGTTTTAGAGCTAGA | PE3 ngRNA (TG; TGG PAM) |
| | AATAGCAAGTTAAAATAAGGCTAGTCCGTTATCA | |
| | ACTTGAAAAAGTGGCACCGAGTCGGTGC (SEQ ID | |
| | NO: 325) | |
| 326 | GAACTGAGCCACGTGAAGACGTTTTAGAGCTAG | PE3 ngRNA (AG; AGG PAM) |
| | AAATAGCAAGTTAAAATAAGGCTAGTCCGTTATC | |
| | AACTTGAAAAAGTGGCACCGAGTCGGTGC (SEQ | |
| | ID NO: 326) | |
| 327 | ACATCTTCCTTAGGAACTCCGTTTTAGAGCTAGA | PE3 ngRNA (TG; TGG PAM) |
| | AATAGCAAGTTAAAATAAGGCTAGTCCGTTATCA | |
| | ACTTGAAAAAGTGGCACCGAGTCGGTGC (SEQ ID | |
| | NO: 327) | |
| 328 | AGGCTTCATACATCTTCCTTGTTTTAGAGCTAGA | PE3 ngRNA (AG; AGG PAM) |
| | AATAGCAAGTTAAAATAAGGCTAGTCCGTTATCA | |
| | ACTTGAAAAAGTGGCACCGAGTCGGTGC (SEQ ID | |
| | NO: 328) | |
| 329 | ACTACTTACCATCTCTTTCAGTTTTAGAGCTAGA | PE3 ngRNA (AG; AGG PAM) |
| | AATAGCAAGTTAAAATAAGGCTAGTCCGTTATCA | |
| | ACTTGAAAAAGTGGCACCGAGTCGGTGC (SEQ ID | |
| | NO: 329) | |
| 330 | GTCTTGCTGGGTTTCCAAAGGTTTTAGAGCTAGA | PE3 ngRNA (TG; TGG PAM), contains 3′ |
| | AATAGCAAGTTAAAATAAGGCTAGTCCGTTATCA | TTTT |
| | ACTTGAAAAAGTGGCACCGAGTCGGTGCTTTT | |
| | (SEQ ID NO: 330) | |
| 331 | GTGAAGACAGGTGTCTTGCTGTTTTAGAGCTAGA | PE3 ngRNA (GG; GGG PAM), contains 3′ |
| | AATAGCAAGTTAAAATAAGGCTAGTCCGTTATCA | TTTT |
| | ACTTGAAAAAGTGGCACCGAGTCGGTGCTTTT | |
| | (SEQ ID NO: 331) | |
| 332 | GAACTGAGCCACGTGAAGACGTTTTAGAGCTAG | PE3 ngRNA (AG; AGG PAM), contains 3′ |
| | AAATAGCAAGTTAAAATAAGGCTAGTCCGTTATC | TTTT |
| | AACTTGAAAAAGTGGCACCGAGTCGGTGCTTTT | |
| | (SEQ ID NO: 332) | |
| 333 | GCGTGAAGACAGGTGTCTTGCGTTTTAGAGCTAG | PE3 ngRNA (TG; TGG PAM), contains 3′ |
| | AAATAGCAAGTTAAAATAAGGCTAGTCCGTTATC | TTTT; 5′G |
| | AACTTGAAAAAGTGGCACCGAGTCGGTGCTTTT | |
| | (SEQ ID NO: 333) | |
| 334 | GACATCTTCCTTAGGAACTCCGTTTTAGAGCTAG | PE3 ngRNA (TG; TGG PAM), contains 3′ |
| | AAATAGCAAGTTAAAATAAGGCTAGTCCGTTATC | TTTT; 5′G |
| | AACTTGAAAAAGTGGCACCGAGTCGGTGCTTTT | |
| | (SEQ ID NO: 334) | |
| 335 | GAGGCTTCATACATCTTCCTTGTTTTAGAGCTAG | PE3 ngRNA (AG; AGG PAM), contains 3′ |
| | AAATAGCAAGTTAAAATAAGGCTAGTCCGTTATC | TTTT; 5′G |
| | AACTTGAAAAAGTGGCACCGAGTCGGTGCTTTT | |
| | (SEQ ID NO: 335) | |
| 336 | GACTACTTACCATCTCTTTCAGTTTTAGAGCTAG | PE3 ngRNA (AG; AGG PAM), contains 3′ |
| | AAATAGCAAGTTAAAATAAGGCTAGTCCGTTATC | TTTT, 5′G |
| | AACTTGAAAAAGTGGCACCGAGTCGGTGCTTTT | |
| | (SEQ ID NO: 336) | |
| 337 | GTCTTGCTGGGTTTCCAAAGGTTTTAGAGCTAGA | PE3 ngRNA (TG; TGG PAM), contains linker |
| | AATAGCAAGTTAAAATAAGGCTAGTCCGTTATCA | sequence AACATTGA; hairpin SEQ ID |
| | ACTTGAAAAAGTGGCACCGAGTCGGTGCAACAT | NO: 3591; 3′ TTTT |
| | TGACGCGTCTCTACGTGGGGGCGCGTTTT (SEQ | |
| | ID NO: 337) | |
| 338 | GTGAAGACAGGTGTCTTGCTGTTTTAGAGCTAGA | PE3 ngRNA (GG; GGG PAM), contains linker |
| | AATAGCAAGTTAAAATAAGGCTAGTCCGTTATCA | sequence AACATTGA; hairpin SEQ ID |
| | ACTTGAAAAAGTGGCACCGAGTCGGTGCAACAT | NO: 3591; 3′ TTTT |
| | TGACGCGTCTCTACGTGGGGGCGCGTTTT (SEQ | |
| | ID NO: 338) | |
| 339 | GAACTGAGCCACGTGAAGACGTTTTAGAGCTAG | PE3 ngRNA (AG; AGG PAM), contains linker |
| | AAATAGCAAGTTAAAATAAGGCTAGTCCGTTATC | sequence AACATTGA; hairpin SEQ ID |
| | AACTTGAAAAAGTGGCACCGAGTCGGTGCAACA | NO: 3591; 3′ TTTT |
| | TTGACGCGTCTCTACGTGGGGGCGCGTTTT (SEQ | |
| | ID NO: 339) | |
| 340 | GCGTGAAGACAGGTGTCTTGCGTTTTAGAGCTAG | PE3 ngRNA (TG; TGG PAM), contains linker |
| | AAATAGCAAGTTAAAATAAGGCTAGTCCGTTATC | sequence AACATTGA; hairpin SEQ ID |
| | AACTTGAAAAAGTGGCACCGAGTCGGTGCAACA | NO: 3591; 3′ TTTT; 5′G |
| | TTGACGCGTCTCTACGTGGGGGCGCGTTTT (SEQ | |
| | ID NO: 340) | |
| 341 | GACATCTTCCTTAGGAACTCCGTTTTAGAGCTAG | PE3 ngRNA (TG; TGG PAM), contains linker |
| | AAATAGCAAGTTAAAATAAGGCTAGTCCGTTATC | sequence AACATTGA; hairpin SEQ ID |
| | AACTTGAAAAAGTGGCACCGAGTCGGTGCAACA | NO: 3591; 3′ TTTT; 5′G |
| | TTGACGCGTCTCTACGTGGGGGCGCGTTTT (SEQ | |
| | ID NO: 341) | |
| 342 | GAGGCTTCATACATCTTCCTTGTTTTAGAGCTAG | PE3 ngRNA (AG; AGG PAM), contains linker |
| | AAATAGCAAGTTAAAATAAGGCTAGTCCGTTATC | sequence AACATTGA; hairpin SEQ ID |
| | AACTTGAAAAAGTGGCACCGAGTCGGTGCAACA | NO: 3591; 3′ TTTT; 5′G |
| | TTGACGCGTCTCTACGTGGGGGCGCGTTTT (SEQ | |
| | ID NO: 342) | |
| 343 | GACTACTTACCATCTCTTTCAGTTTTAGAGCTAG | PE3 ngRNA (AG; AGG PAM), contains linker |
| | AAATAGCAAGTTAAAATAAGGCTAGTCCGTTATC | sequence AACATTGA; hairpin SEQ ID |
| | AACTTGAAAAAGTGGCACCGAGTCGGTGCAACA | NO: 3591; 3′ TTTT; 5′G |
| | TTGACGCGTCTCTACGTGGGGGCGCGTTTT (SEQ | |
| | ID NO: 343) | |
| 3611 | GGATGCAGAAGCTTTCTGTAGTTTTAGAGCTAGA | pegRNA, contains linker sequence |
| | AATAGCAAGTTAAAATAAGGCTAGTCCGTTATCA | AACATTGA; hairpin SEQ ID NO: 3591 |
| | ACTTGAAAAAGTGGCACCGAGTCGGTGCTGATC | |
| | CCATACAGAAAGCTAACATTGACGCGTCTCTACG | |
| | TGGGGGCGCG (SEQ ID NO: 3611) | |
| 3612 | GGATGCAGAAGCTTTCTGTAGTTTTAGAGCTAGA | pegRNA, contains linker sequence |
| | AATAGCAAGTTAAAATAAGGCTAGTCCGTTATCA | AACATTGA; hairpin SEQ ID NO: 3591 |
| | ACTTGAAAAAGTGGCACCGAGTCGGTGCTGATC | |
| | CCATACAGAAAGCTTCAACATTGACGCGTCTCTA | |
| | CGTGGGGGCGCG (SEQ ID NO: 3612) | |
| 3613 | GGATGCAGAAGCTTTCTGTAGTTTTAGAGCTAGA | pegRNA, contains linker sequence |
| | AATAGCAAGTTAAAATAAGGCTAGTCCGTTATCA | AACATTGA; hairpin SEQ ID NO: 3591 |
| | ACTTGAAAAAGTGGCACCGAGTCGGTGCGCCTG | |
| | ATCCCATACAGAAAGCTAACATTGACGCGTCTCT | |
| | ACGTGGGGGCGCG (SEQ ID NO: 3613) | |
| 3614 | GGATGCAGAAGCTTTCTGTAGTTTTAGAGCTAGA | pegRNA, contains linker sequence |
| | AATAGCAAGTTAAAATAAGGCTAGTCCGTTATCA | AACATTGA; hairpin SEQ ID NO: 3591 |
| | ACTTGAAAAAGTGGCACCGAGTCGGTGCTGATC | |
| | CCATACAGAAAGCTTCTGAACATTGACGCGTCTC | |
| | TACGTGGGGGCGCG (SEQ ID NO: 3614) | |
| 3615 | GGATGCAGAAGCTTTCTGTAGTTTTAGAGCTAGA | pegRNA, contains linker sequence |
| | AATAGCAAGTTAAAATAAGGCTAGTCCGTTATCA | AACATTGA; hairpin SEQ ID NO: 3591 |
| | ACTTGAAAAAGTGGCACCGAGTCGGTGCGCCTG | |
| | ATCCCATACAGAAAGCTTCAACATTGACGCGTCT | |
| | CTACGTGGGGGCGCG (SEQ ID NO: 3615) | |
| 3616 | GGATGCAGAAGCTTTCTGTAGTTTTAGAGCTAGA | pegRNA, contains linker sequence |
| | AATAGCAAGTTAAAATAAGGCTAGTCCGTTATCA | AACATTGA; hairpin SEQ ID NO: 3591 |
| | ACTTGAAAAAGTGGCACCGAGTCGGTGCAAGCC | |
| | TGATCCCATACAGAAAGCTAACATTGACGCGTCT | |
| | CTACGTGGGGGCGCG (SEQ ID NO: 3616) | |
| 3617 | GGATGCAGAAGCTTTCTGTAGTTTTAGAGCTAGA | pegRNA, contains linker sequence |
| | AATAGCAAGTTAAAATAAGGCTAGTCCGTTATCA | AACATTGA; hairpin SEQ ID NO: 3591 |
| | ACTTGAAAAAGTGGCACCGAGTCGGTGCTGATC | |
| | CCATACAGAAAGCTTCTGCAAACATTGACGCGTC | |
| | TCTACGTGGGGGCGCG (SEQ ID NO: 3617) | |
| 3618 | GGATGCAGAAGCTTTCTGTAGTTTTAGAGCTAGA | pegRNA, contains linker sequence |
| | AATAGCAAGTTAAAATAAGGCTAGTCCGTTATCA | AACATTGA; hairpin SEQ ID NO: 3591 |
| | ACTTGAAAAAGTGGCACCGAGTCGGTGCGCCTG | |
| | ATCCCATACAGAAAGCTTCTGAACATTGACGCGT | |
| | CTCTACGTGGGGGCGCG (SEQ ID NO: 3618) | |
| 3619 | GGATGCAGAAGCTTTCTGTAGTTTTAGAGCTAGA | pegRNA, contains linker sequence |
| | AATAGCAAGTTAAAATAAGGCTAGTCCGTTATCA | AACATTGA; hairpin SEQ ID NO: 3591 |
| | ACTTGAAAAAGTGGCACCGAGTCGGTGCAAGCC | |
| | TGATCCCATACAGAAAGCTTCAACATTGACGCGT | |
| | CTCTACGTGGGGGCGCG (SEQ ID NO: 3619) | |
| 3620 | GGATGCAGAAGCTTTCTGTAGTTTTAGAGCTAGA | pegRNA, contains linker sequence |
| | AATAGCAAGTTAAAATAAGGCTAGTCCGTTATCA | AACATTGA; hairpin SEQ ID NO: 3591 |
| | ACTTGAAAAAGTGGCACCGAGTCGGTGCGGAAG | |
| | CCTGATCCCATACAGAAAGCTAACATTGACGCGT | |
| | CTCTACGTGGGGGCGCG (SEQ ID NO: 3620) | |
| 3621 | GGATGCAGAAGCTTTCTGTAGTTTTAGAGCTAGA | pegRNA, contains linker sequence |
| | AATAGCAAGTTAAAATAAGGCTAGTCCGTTATCA | AACATTGA; hairpin SEQ ID NO: 3591 |
| | ACTTGAAAAAGTGGCACCGAGTCGGTGCGCCTG | |
| | ATCCCATACAGAAAGCTTCTGCAAACATTGACGC | |
| | GTCTCTACGTGGGGGCGCG (SEQ ID NO: 3621) | |
| 3622 | GGATGCAGAAGCTTTCTGTAGTTTTAGAGCTAGA | pegRNA, contains linker sequence |
| | AATAGCAAGTTAAAATAAGGCTAGTCCGTTATCA | AACATTGA; hairpin SEQ ID NO: 3591 |
| | ACTTGAAAAAGTGGCACCGAGTCGGTGCAAGCC | |
| | TGATCCCATACAGAAAGCTTCTGAACATTGACGC | |
| | GTCTCTACGTGGGGGCGCG (SEQ ID NO: 3622) | |
| 3623 | GGATGCAGAAGCTTTCTGTAGTTTTAGAGCTAGA | pegRNA, contains linker sequence |
| | AATAGCAAGTTAAAATAAGGCTAGTCCGTTATCA | AACATTGA; hairpin SEQ ID NO: 3591 |
| | ACTTGAAAAAGTGGCACCGAGTCGGTGCGGAAG | |
| | CCTGATCCCATACAGAAAGCTTCAACATTGACGC | |
| | GTCTCTACGTGGGGGCGCG (SEQ ID NO: 3623) | |
| 3624 | GGATGCAGAAGCTTTCTGTAGTTTTAGAGCTAGA | pegRNA, contains linker sequence |
| | AATAGCAAGTTAAAATAAGGCTAGTCCGTTATCA | AACATTGA; hairpin SEQ ID NO: 3591 |
| | ACTTGAAAAAGTGGCACCGAGTCGGTGCGTGGA | |
| | AGCCTGATCCCATACAGAAAGCTAACATTGACG | |
| | CGTCTCTACGTGGGGGCGCG (SEQ ID NO: 3624) | |
| 3625 | GGATGCAGAAGCTTTCTGTAGTTTTAGAGCTAGA | pegRNA, contains linker sequence |
| | AATAGCAAGTTAAAATAAGGCTAGTCCGTTATCA | AACATTGA; hairpin SEQ ID NO: 3591 |
| | ACTTGAAAAAGTGGCACCGAGTCGGTGCAAGCC | |
| | TGATCCCATACAGAAAGCTTCTGCAAACATTGAC | |
| | GCGTCTCTACGTGGGGGCGCG (SEQ ID NO: 3625) | |
| 3626 | GGATGCAGAAGCTTTCTGTAGTTTTAGAGCTAGA | pegRNA, contains linker sequence |
| | AATAGCAAGTTAAAATAAGGCTAGTCCGTTATCA | AACATTGA; hairpin SEQ ID NO: 3591 |
| | ACTTGAAAAAGTGGCACCGAGTCGGTGCGGAAG | |
| | CCTGATCCCATACAGAAAGCTTCTGAACATTGAC | |
| | GCGTCTCTACGTGGGGGCGCG (SEQ ID NO: 3626) | |
| 3627 | GGATGCAGAAGCTTTCTGTAGTTTTAGAGCTAGA | pegRNA, contains linker sequence |
| | AATAGCAAGTTAAAATAAGGCTAGTCCGTTATCA | AACATTGA; hairpin SEQ ID NO: 3591 |
| | ACTTGAAAAAGTGGCACCGAGTCGGTGCGTGGA | |
| | AGCCTGATCCCATACAGAAAGCTTCAACATTGAC | |
| | GCGTCTCTACGTGGGGGCGCG (SEQ ID NO: 3627) | |
| 3628 | GGATGCAGAAGCTTTCTGTAGTTTTAGAGCTAGA | pegRNA, contains linker sequence |
| | AATAGCAAGTTAAAATAAGGCTAGTCCGTTATCA | AACATTGA; hairpin SEQ ID NO: 3591 |
| | ACTTGAAAAAGTGGCACCGAGTCGGTGCGGAAG | |
| | CCTGATCCCATACAGAAAGCTTCTGCAAACATTG | |
| | ACGCGTCTCTACGTGGGGGCGCG (SEQ ID NO: | |
| | 3628) | |
| 3629 | GGATGCAGAAGCTTTCTGTAGTTTTAGAGCTAGA | pegRNA, contains linker sequence |
| | AATAGCAAGTTAAAATAAGGCTAGTCCGTTATCA | AACATTGA; hairpin SEQ ID NO: 3591 |
| | ACTTGAAAAAGTGGCACCGAGTCGGTGCGTGGA | |
| | AGCCTGATCCCATACAGAAAGCTTCTGAACATTG | |
| | ACGCGTCTCTACGTGGGGGCGCG (SEQ ID NO: | |
| | 3629) | |
| 3630 | GGATGCAGAAGCTTTCTGTAGTTTTAGAGCTAGA | pegRNA, contains linker sequence |
| | AATAGCAAGTTAAAATAAGGCTAGTCCGTTATCA | AACATTGA; hairpin SEQ ID NO: 3591 |
| | ACTTGAAAAAGTGGCACCGAGTCGGTGCGTGGA | |
| | AGCCTGATCCCATACAGAAAGCTTCTGCAAACAT | |
| | TGACGCGTCTCTACGTGGGGGCGCG (SEQ ID NO: | |
| | 3630) | |
| 3604 | GTCTTGCTGGGTTTCCAAAGGTTTTAGAGCTAGA | PE3 ngRNA (TG; TGG PAM), contains linker |
| | AATAGCAAGTTAAAATAAGGCTAGTCCGTTATCA | sequence AACATTGA; hairpin SEQ ID |
| | ACTTGAAAAAGTGGCACCGAGTCGGTGCAACAT | NO: 3591 |
| | TGACGCGTCTCTACGTGGGGGCGCG (SEQ ID NO: | |
| | 3604) | |
| 3605 | GTGAAGACAGGTGTCTTGCTGTTTTAGAGCTAGA | PE3 ngRNA (GG; GGG PAM), contains linker |
| | AATAGCAAGTTAAAATAAGGCTAGTCCGTTATCA | sequence AACATTGA; hairpin SEQ ID |
| | ACTTGAAAAAGTGGCACCGAGTCGGTGCAACAT | NO: 3591 |
| | TGACGCGTCTCTACGTGGGGGCGCG (SEQ ID NO: | |
| | 3605) | |
| 3606 | GAACTGAGCCACGTGAAGACGTTTTAGAGCTAG | PE3 ngRNA (AG; AGG PAM), contains linker |
| | AAATAGCAAGTTAAAATAAGGCTAGTCCGTTATC | sequence AACATTGA; hairpin SEQ ID |
| | AACTTGAAAAAGTGGCACCGAGTCGGTGCAACA | NO: 3591 |
| | TTGACGCGTCTCTACGTGGGGGCGCG (SEQ ID | |
| | NO: 3606) | |
| 3607 | CGTGAAGACAGGTGTCTTGCGTTTTAGAGCTAGA | PE3 ngRNA (TG; TGG PAM), contains linker |
| | AATAGCAAGTTAAAATAAGGCTAGTCCGTTATCA | sequence AACATTGA; hairpin SEQ ID |
| | ACTTGAAAAAGTGGCACCGAGTCGGTGCAACAT | NO: 3591 |
| | TGACGCGTCTCTACGTGGGGGCGCG (SEQ ID NO: | |
| | 3607) | |
| 3608 | ACATCTTCCTTAGGAACTCCGTTTTAGAGCTAGA | PE3 ngRNA (TG; TGG PAM), contains linker |
| | AATAGCAAGTTAAAATAAGGCTAGTCCGTTATCA | sequence AACATTGA; hairpin SEQ ID |
| | ACTTGAAAAAGTGGCACCGAGTCGGTGCAACAT | NO: 3591 |
| | TGACGCGTCTCTACGTGGGGGCGCG (SEQ ID NO: | |
| | 3608) | |
| 3609 | AGGCTTCATACATCTTCCTTGTTTTAGAGCTAGA | PE3 ngRNA (AG; AGG PAM), contains linker |
| | AATAGCAAGTTAAAATAAGGCTAGTCCGTTATCA | sequence AACATTGA; hairpin SEQ ID |
| | ACTTGAAAAAGTGGCACCGAGTCGGTGCAACAT | NO: 3591 |
| | TGACGCGTCTCTACGTGGGGGCGCG (SEQ ID NO: | |
| | 3609) | |
| 3610 | ACTACTTACCATCTCTTTCAGTTTTAGAGCTAGA | PE3 ngRNA (AG; AGG PAM), contains linker |
| | AATAGCAAGTTAAAATAAGGCTAGTCCGTTATCA | sequence AACATTGA; hairpin SEQ ID |
| | ACTTGAAAAAGTGGCACCGAGTCGGTGCAACAT | NO: 3591 |
| | TGACGCGTCTCTACGTGGGGGCGCG (SEQ ID NO: | |
| | 3610) | |

TABLE 16

| Sequence | | |
|---|---|---|
| Number | Sequence | Description |
| 1025 | TTTCCAAAGTGGAAGCC (SEQ ID NO: 1025) | PEgRNA spacer (TG; TGA PAM) |
| 1026 | GTTTCCAAAGTGGAAGCC (SEQ ID NO: 1026) | PEgRNA spacer (TG; TGA PAM) |
| 1027 | GGTTTCCAAAGTGGAAGCC (SEQ ID NO: 1027) | PEgRNA spacer (TG; TGA PAM) |
| 211 | GGGTTTCCAAAGTGGAAGCC (SEQ ID NO: 211) | PEgRNA spacer (TG; TGA PAM) |
| 1028 | TGGGTTTCCAAAGTGGAAGCC (SEQ ID NO: 1028) | PEgRNA spacer (TG; TGA PAM) |
| 1029 | CTGGGTTTCCAAAGTGGAAGCC (SEQ ID NO: | PEgRNA spacer (TG; TGA PAM) |
| | 1029) | |
| 1030 | TTCCA | PBS |
| 1031 | TTCCAC | PBS |
| 1032 | TTCCACT | PBS |
| 1033 | TTCCACTT | PBS |
| 1034 | TTCCACTTT | PBS |
| 1035 | TTCCACTTTG (SEQ ID NO: 1035) | PBS |
| 1036 | TTCCACTTTGG (SEQ ID NO: 1036) | PBS |
| 1037 | TTCCACTTTGGA (SEQ ID NO: 1037) | PBS |
| 1038 | TTCCACTTTGGAA (SEQ ID NO: 1038) | PBS |
| 1039 | TTCCACTTTGGAAA (SEQ ID NO: 1039) | PBS |
| 1040 | TTCCACTTTGGAAAC (SEQ ID NO: 1040) | PBS |
| 1041 | TTCCACTTTGGAAACC (SEQ ID NO: 1041) | PBS |
| 1042 | TTCCACTTTGGAAACCC (SEQ ID NO: 1042) | PBS |
| 1043 | TTCCACTTTGGAAACCCA (SEQ ID NO: 1043) | PBS |
| 1044 | TTCCACTTTGGAAACCCAG (SEQ ID NO: 1044) | PBS |
| 1045 | GGGACCAGGC (SEQ ID NO: 1045) | RTT (TGA-to-TGG PAM silencing edit) |
| 1046 | GGGATCAGGC (SEQ ID NO: 1046) | RTT*1, 2 |
| 1047 | TGGGACCAGGC (SEQ ID NO: 1047) | RTT (TGA-to-TGG PAM silencing edit) |
| 1048 | TGGGATCAGGC (SEQ ID NO: 1048) | RTT*1, 2 |
| 1049 | ATGGGACCAGGC (SEQ ID NO: 1049) | RTT (TGA-to-TGG PAM silencing edit) |
| 1050 | ATGGGATCAGGC (SEQ ID NO: 1050) | RTT*1, 2 |
| 1051 | TATGGGACCAGGC (SEQ ID NO: 1051) | RTT (TGA-to-TGG PAM silencing edit) |
| 1052 | TATGGGATCAGGC (SEQ ID NO: 1052) | RTT*1, 2 |
| 1053 | GTATGGGACCAGGC (SEQ ID NO: 1053) | RTT (TGA-to-TGG PAM silencing edit) |
| 1054 | GTATGGGATCAGGC (SEQ ID NO: 1054) | RTT*1, 2 |
| 1055 | TGTATGGGACCAGGC (SEQ ID NO: 1055) | RTT (TGA-to-TGG PAM silencing edit) |
| 1056 | TGTATGGGATCAGGC (SEQ ID NO: 1056) | RTT*1, 2 |
| 1057 | CTGTATGGGACCAGGC (SEQ ID NO: 1057) | RTT (TGA-to-TGG PAM silencing edit) |
| 1058 | CTGTATGGGATCAGGC (SEQ ID NO: 1058) | RTT*1, 2 |
| 1059 | TCTGTATGGGACCAGGC (SEQ ID NO: 1059) | RTT (TGA-to-TGG PAM silencing edit) |
| 1060 | TCTGTATGGGATCAGGC (SEQ ID NO: 1060) | RTT*1, 2 |
| 1061 | TTCTGTATGGGACCAGGC (SEQ ID NO: 1061) | RTT (TGA-to-TGG PAM silencing edit) |
| 1062 | TTCTGTATGGGATCAGGC (SEQ ID NO: 1062) | RTT*1, 2 |
| 1063 | TTTCTGTATGGGACCAGGC (SEQ ID NO: 1063) | RTT (TGA-to-TGG PAM silencing edit) |
| 1064 | TTTCTGTATGGGATCAGGC (SEQ ID NO: 1064) | RTT*1, 2 |
| 1065 | CTTTCTGTATGGGACCAGGC (SEQ ID NO: 1065) | RTT (TGA-to-TGG PAM silencing edit) |
| 1066 | CTTTCTGTATGGGATCAGGC (SEQ ID NO: 1066) | RTT*1, 2 |
| 1067 | GCTTTCTGTATGGGACCAGGC (SEQ ID NO: 1067) | RTT (TGA-to-TGG PAM silencing edit) |
| 1068 | GCTTTCTGTATGGGATCAGGC (SEQ ID NO: 1068) | RTT*1, 2 |
| 1069 | AGCTTTCTGTATGGGACCAGGC (SEQ ID NO: 1069) | RTT (TGA-to-TGG PAM silencing edit) |
| 1070 | AGCTTTCTGTATGGGATCAGGC (SEQ ID NO: 1070) | RTT*1, 2 |
| 1071 | AAGCTTTCTGTATGGGACCAGGC (SEQ ID NO: | RTT (TGA-to-TGG PAM silencing edit) |
| | 1071) | |
| 1072 | AAGCTTTCTGTATGGGATCAGGC (SEQ ID NO: | RTT*1, 2 |
| | 1072) | |
| 1073 | GAAGCTTTCTGTATGGGACCAGGC (SEQ ID NO: | RTT (TGA-to-TGG PAM silencing edit) |
| | 1073) | |
| 1074 | GAAGCTTTCTGTATGGGATCAGGC (SEQ ID NO: | RTT*1, 2 |
| | 1074) | |
| 1075 | AGAAGCTTTCTGTATGGGACCAGGC (SEQ ID NO: | RTT (TGA-to-TGG PAM silencing edit) |
| | 1075) | |
| 1076 | AGAAGCTTTCTGTATGGGATCAGGC (SEQ ID NO: | RTT*1, 2 |
| | 1076) | |
| 1077 | CAGAAGCTTTCTGTATGGGACCAGGC (SEQ ID | RTT (TGA-to-TGG PAM silencing edit) |
| | NO: 1077) | |
| 1078 | CAGAAGCTTTCTGTATGGGATCAGGC (SEQ ID | RTT*1, 2 |
| | NO: 1078) | |
| 1079 | GCAGAAGCTTTCTGTATGGGACCAGGC (SEQ ID | RTT (TGA-to-TGG PAM silencing edit) |
| | NO: 1079) | |
| 1080 | GCAGAAGCTTTCTGTATGGGATCAGGC (SEQ ID | RTT*1, 2 |
| | NO: 1080) | |
| 1081 | TGCAGAAGCTTTCTGTATGGGACCAGGC (SEQ ID | RTT (TGA-to-TGG PAM silencing edit) |
| | NO: 1081) | |
| 1082 | TGCAGAAGCTTTCTGTATGGGATCAGGC (SEQ ID | RTT*1, 2 |
| | NO: 1082) | |
| 1083 | ATGCAGAAGCTTTCTGTATGGGACCAGGC (SEQ | RTT (TGA-to-TGG PAM silencing edit) |
| | ID NO: 1083) | |
| 1084 | ATGCAGAAGCTTTCTGTATGGGATCAGGC (SEQ | RTT*1, 2 |
| | ID NO: 1084) | |
| 1085 | GATGCAGAAGCTTTCTGTATGGGACCAGGC (SEQ | RTT (TGA-to-TGG PAM silencing edit) |
| | ID NO: 1085) | |
| 1086 | GATGCAGAAGCTTTCTGTATGGGATCAGGC (SEQ | RTT*1, 2 |
| | ID NO: 1086) | |
| 1087 | GGATGCAGAAGCTTTCTGTATGGGACCAGGC | RTT (TGA-to-TGG PAM silencing edit) |
| | (SEQ ID NO: 1087) | |
| 1088 | GGATGCAGAAGCTTTCTGTATGGGATCAGGC | RTT*1, 2 |
| | (SEQ ID NO: 1088) | |
| 1089 | TGGATGCAGAAGCTTTCTGTATGGGACCAGGC | RTT (TGA-to-TGG PAM silencing edit) |
| | (SEQ ID NO: 1089) | |
| 1090 | TGGATGCAGAAGCTTTCTGTATGGGATCAGGC | RTT*1, 2 |
| | (SEQ ID NO: 1090) | |
| 1091 | TTGGATGCAGAAGCTTTCTGTATGGGACCAGGC | RTT (TGA-to-TGG PAM silencing edit) |
| | (SEQ ID NO: 1091) | |
| 1092 | TTGGATGCAGAAGCTTTCTGTATGGGATCAGGC | RTT*1, 2 |
| | (SEQ ID NO: 1092) | |
| 1093 | TTTGGATGCAGAAGCTTTCTGTATGGGACCAGGC | RTT (TGA-to-TGG PAM silencing edit) |
| | (SEQ ID NO: 1093) | |
| 1094 | TTTGGATGCAGAAGCTTTCTGTATGGGATCAGGC | RTT*1, 2 |
| | (SEQ ID NO: 1094) | |
| 1095 | TTTTGGATGCAGAAGCTTTCTGTATGGGACCAGG | RTT (TGA-to-TGG PAM silencing edit) |
| | C (SEQ ID NO: 1095) | |
| 1096 | TTTTGGATGCAGAAGCTTTCTGTATGGGATCAGG | RTT*1, 2 |
| | C (SEQ ID NO: 1096) | |
| 1097 | GTTTTGGATGCAGAAGCTTTCTGTATGGGACCAG | RTT (TGA-to-TGG PAM silencing edit) |
| | GC (SEQ ID NO: 1097) | |
| 1098 | GTTTTGGATGCAGAAGCTTTCTGTATGGGATCAG | RTT*1, 2 |
| | GC (SEQ ID NO: 1098) | |
| 1099 | AGTTTTGGATGCAGAAGCTTTCTGTATGGGACCA | RTT (TGA-to-TGG PAM silencing edit) |
| | GGC (SEQ ID NO: 1099) | |
| 1100 | AGTTTTGGATGCAGAAGCTTTCTGTATGGGATCA | RTT*1, 2 |
| | GGC (SEQ ID NO: 1100) | |
| 1101 | CAGTTTTGGATGCAGAAGCTTTCTGTATGGGACC | RTT (TGA-to-TGG PAM silencing edit) |
| | AGGC (SEQ ID NO: 1101) | |
| 1102 | CAGTTTTGGATGCAGAAGCTTTCTGTATGGGATC | RTT*1, 2 |
| | AGGC (SEQ ID NO: 1102) | |
| 1103 | TCAGTTTTGGATGCAGAAGCTTTCTGTATGGGAC | RTT (TGA-to-TGG PAM silencing edit) |
| | CAGGC (SEQ ID NO: 1103) | |
| 1104 | TCAGTTTTGGATGCAGAAGCTTTCTGTATGGGAT | RTT*1, 2 |
| | CAGGC (SEQ ID NO: 1104) | |
| 1105 | ATCAGTTTTGGATGCAGAAGCTTTCTGTATGGGA | RTT (TGA-to-TGG PAM silencing edit) |
| | CCAGGC (SEQ ID NO: 1105) | |
| 1106 | ATCAGTTTTGGATGCAGAAGCTTTCTGTATGGGA | RTT*1, 2 |
| | TCAGGC (SEQ ID NO: 1106) | |
| 24 | AAGATGGCTCAAGATTCAGT (SEQ ID NO: 24) | PE3 ngRNA spacer (AG; AGA PAM) |
| 25 | AAGATTCAGTAGATCTTTCT (SEQ ID NO: 25) | PE3 ngRNA spacer (TG PAM) |
| 26 | AAGCTTTCTGTATGGGATCA (SEQ ID NO: 26) | PE3b*1 ngRNA spacer (GG PAM) |
| 27 | AGATCTTTCTTGTGATTATC (SEQ ID NO: 27) | PE3 ngRNA spacer (AG PAM) |
| 1107 | ATTTCCTTCAGTGCTGGACA (SEQ ID NO: 1107) | PE3 ngRNA spacer (GG PAM) |
| 1108 | CAGTGCTGGACAGGCTGCTG (SEQ ID NO: 1108) | PE3 ngRNA spacer (TG; TGA PAM) |
| 1109 | CATTTCCTTCAGTGCTGGAC (SEQ ID NO: 1109) | PE3 ngRNA spacer (AG PAM) |
| 29 | CCTTTTCGCTTTTTCCAAGA (SEQ ID NO: 29) | PE3 ngRNA spacer (TG PAM) |
| 1110 | CTGGACAGGCTGCTGTGAAG (SEQ ID NO: 1110) | PE3 ngRNA spacer (GG; GGA PAM) |
| 30 | CTTTTCGCTTTTTCCAAGAT (SEQ ID NO: 30) | PE3 ngRNA spacer (GG PAM) |
| 31 | GAAGCTTTCTGTATGGGATC (SEQ ID NO: 31) | PE3b*2 ngRNA spacer (AG PAM) |
| 32 | GATGCAGAAGCTTTCTGTAT (SEQ ID NO: 32) | PE3 ngRNA spacer (GG; GGA PAM) |
| 33 | GATTCAGTAGATCTTTCTTG (SEQ ID NO: 33) | PE3 ngRNA spacer (TG; TGA PAM) |
| 1111 | GCTGGACAGGCTGCTGTGAA (SEQ ID NO: 1111) | PE3 ngRNA spacer (GG PAM) |
| 34 | GCTTTTTCCAAGATGGCTCA (SEQ ID NO: 34) | PE3 ngRNA spacer (AG; AGA PAM) |
| 35 | GGATGCAGAAGCTTTCTGTA (SEQ ID NO: 35) | PE3 ngRNA spacer (TG PAM) |
| 37 | GTGAAGGGACATCACCTTTT (SEQ ID NO: 37) | PE3 ngRNA spacer (CG PAM) |
| 38 | TCACCTTTTCGCTTTTTCCA (SEQ ID NO: 38) | PE3 ngRNA spacer (AG; AGA PAM) |
| 39 | TCCAAGATGGCTCAAGATTC (SEQ ID NO: 39) | PE3 ngRNA spacer (AG PAM) |
| 1112 | TCCTTCAGTGCTGGACAGGC (SEQ ID NO: 1112) | PE3 ngRNA spacer (TG PAM) |
| 41 | TGATTATCAGTTTTGGATGC (SEQ ID NO: 41) | PE3 ngRNA spacer (AG; AGA PAM) |
| 1113 | TGCTGGACAGGCTGCTGTGA (SEQ ID NO: 1113) | PE3 ngRNA spacer (AG PAM) |
| 44 | TTATCAGTTTTGGATGCAGA (SEQ ID NO: 44) | PE3 ngRNA spacer (AG PAM) |
| 1114 | TTCAGTGCTGGACAGGCTGC (SEQ ID NO: 1114) | PE3 ngRNA spacer (TG PAM) |
| 45 | TTCTTGTGATTATCAGTTTT (SEQ ID NO: 45) | PE3 ngRNA spacer (GG; GGA PAM) |
| 46 | TTGTGATTATCAGTTTTGGA (SEQ ID NO: 46) | PE3 ngRNA spacer (TG PAM) |
| 47 | TTTCTTGTGATTATCAGTTT (SEQ ID NO: 47) | PE3 ngRNA spacer (TG PAM) |
| 48 | TTTTGGATGCAGAAGCTTTC (SEQ ID NO: 48) | PE3 ngRNA spacer (TG PAM) |
| 49 | TTTCTTGTGATTATCAGTTTGTTTTAGAGCTAGAA | PE3 ngRNA (TG PAM) |
| | ATAGCAAGTTAAAATAAGGCTAGTCCGTTATCAA | |
| | CTTGAAAAAGTGGCACCGAGTCGGTGC (SEQ ID | |
| | NO: 49) | |
| 50 | GGATGCAGAAGCTTTCTGTAGTTTTAGAGCTAGA | PE3 ngRNA (TG PAM) |
| | AATAGCAAGTTAAAATAAGGCTAGTCCGTTATCA | |
| | ACTTGAAAAAGTGGCACCGAGTCGGTGC (SEQ ID | |
| | NO: 50) | |
| 51 | GAAGCTTTCTGTATGGGATCGTTTTAGAGCTAGA | PE3b*2 ngRNA (AG PAM) |
| | AATAGCAAGTTAAAATAAGGCTAGTCCGTTATCA | |
| | ACTTGAAAAAGTGGCACCGAGTCGGTGC (SEQ ID | |
| | NO: 51) | |
| 53 | GGATGCAGAAGCTTTCTGTAGTTTTAGAGCTAGA | PE3 ngRNA (TG PAM), contains end |
| | AATAGCAAGTTAAAATAAGGCTAGTCCGTTATCA | adaptations |
| | ACTTGAAAAAGTGGCACCGAGTCGGTGCTTTT | |
| | (SEQ ID NO: 53) | |
| 54 | GAAGCTTTCTGTATGGGATCGTTTTAGAGCTAGA | PE3b*2 ngRNA (AG PAM), end adaptations |
| | AATAGCAAGTTAAAATAAGGCTAGTCCGTTATCA | |
| | ACTTGAAAAAGTGGCACCGAGTCGGTGCTTTT | |
| | (SEQ ID NO: 54) | |
| 55 | GTTTCTTGTGATTATCAGTTTGTTTTAGAGCTAGA | PE3 ngRNA (TG PAM), contains end |
| | AATAGCAAGTTAAAATAAGGCTAGTCCGTTATCA | adaptations |
| | ACTTGAAAAAGTGGCACCGAGTCGGTGCTTTT | |
| | (SEQ ID NO: 55) | |
| 57 | GGATGCAGAAGCTTTCTGTAGTTTTAGAGCTAGA | PE3 ngRNA (TG PAM), contains linker |
| | AATAGCAAGTTAAAATAAGGCTAGTCCGTTATCA | sequence AACATTGA; hairpin SEQ ID |
| | ACTTGAAAAAGTGGCACCGAGTCGGTGCAACAT | NO: 3591; end adaptations |
| | TGACGCGTCTCTACGTGGGGGCGCGTTTT (SEQ | |
| | ID NO: 57) | |
| 58 | GAAGCTTTCTGTATGGGATCGTTTTAGAGCTAGA | PE3b*2 ngRNA (AG PAM), contains linker |
| | AATAGCAAGTTAAAATAAGGCTAGTCCGTTATCA | sequence AACATTGA; hairpin SEQ ID |
| | ACTTGAAAAAGTGGCACCGAGTCGGTGCAACAT | NO: 3591; end adaptations |
| | TGACGCGTCTCTACGTGGGGGCGCGTTTT (SEQ | |
| | ID NO: 58) | |
| 59 | GTTTCTTGTGATTATCAGTTTGTTTTAGAGCTAGA | PE3 ngRNA (TG PAM), contains linker |
| | AATAGCAAGTTAAAATAAGGCTAGTCCGTTATCA | sequence AACATTGA; hairpin SEQ ID |
| | ACTTGAAAAAGTGGCACCGAGTCGGTGCAACAT | NO: 3591; end adaptations |
| | TGACGCGTCTCTACGTGGGGGCGCGTTTT (SEQ | |
| | ID NO: 59) | |

TABLE 17

| Sequence | | |
|---|---|---|
| Number | Sequence | Description |
| 1115 | GTCTTGCTGGGTTTCCA (SEQ ID NO: 1115) | PEgRNA spacer (AAG PAM) |
| 1116 | TGTCTTGCTGGGTTTCCA (SEQ ID NO: 1116) | PEgRNA spacer (AAG PAM) |
| 1117 | GTGTCTTGCTGGGTTTCCA (SEQ ID NO: 1117) | PEgRNA spacer (AAG PAM) |
| 486 | GGTGTCTTGCTGGGTTTCCA (SEQ ID NO: 486) | PEgRNA spacer (AAG PAM) |
| 1118 | AGGTGTCTTGCTGGGTTTCCA (SEQ ID NO: 1118) | PEgRNA spacer (AAG PAM) |
| 1119 | CAGGTGTCTTGCTGGGTTTCCA (SEQ ID NO: 1119) | PEgRNA spacer (AAG PAM) |
| 1120 | AAACC | PBS |
| 1121 | AAACCC | PBS |
| 1122 | AAACCCA | PBS |
| 1123 | AAACCCAG | PBS |
| 1124 | AAACCCAGC | PBS |
| 1125 | AAACCCAGCA (SEQ ID NO: 1125) | PBS |
| 1126 | AAACCCAGCAA (SEQ ID NO: 1126) | PBS |
| 1127 | AAACCCAGCAAG (SEQ ID NO: 1127) | PBS |
| 1128 | AAACCCAGCAAGA (SEQ ID NO: 1128) | PBS |
| 1129 | AAACCCAGCAAGAC (SEQ ID NO: 1129) | PBS |
| 1130 | AAACCCAGCAAGACA (SEQ ID NO: 1130) | PBS |
| 1131 | AAACCCAGCAAGACAC (SEQ ID NO: 1131) | PBS |
| 1132 | AAACCCAGCAAGACACC (SEQ ID NO: 1132) | PBS |
| 1133 | AAACCCAGCAAGACACCT (SEQ ID NO: 1133) | PBS |
| 1134 | AAACCCAGCAAGACACCTG (SEQ ID NO: 1134) | PBS |
| 1135 | GATCAGGCTTCCACATTGG (SEQ ID NO: 1135) | RTT (AAG-to-ATG PAM silencing edit) |
| 1136 | GATCAGGCTTCCACCTTGG (SEQ ID NO: 1136) | RTT (AAG-to-AGG PAM silencing edit) |
| 1137 | GATCAGGCTTCCACGTTGG (SEQ ID NO: 1137) | RTT (AAG-to-ACG PAM silencing edit) |
| 1138 | GATCAGGCTTCCACTTTGG (SEQ ID NO: 1138) | RTT |
| 1139 | GGATCAGGCTTCCACATTGG (SEQ ID NO: 1139) | RTT (AAG-to-ATG PAM silencing edit) |
| 1140 | GGATCAGGCTTCCACCTTGG (SEQ ID NO: 1140) | RTT (AAG-to-AGG PAM silencing edit) |
| 1141 | GGATCAGGCTTCCACGTTGG (SEQ ID NO: 1141) | RTT (AAG-to-ACG PAM silencing edit) |
| 1142 | GGATCAGGCTTCCACTTTGG (SEQ ID NO: 1142) | RTT |
| 1143 | GGGATCAGGCTTCCACATTGG (SEQ ID NO: 1143) | RTT (AAG-to-ATG PAM silencing edit) |
| 1144 | GGGATCAGGCTTCCACCTTGG (SEQ ID NO: 1144) | RTT (AAG-to-AGG PAM silencing edit) |
| 1145 | GGGATCAGGCTTCCACGTTGG (SEQ ID NO: 1145) | RTT (AAG-to-ACG PAM silencing edit) |
| 1146 | GGGATCAGGCTTCCACTTTGG (SEQ ID NO: 1146) | RTT |
| 1147 | TGGGATCAGGCTTCCACATTGG (SEQ ID NO: 1147) | RTT (AAG-to-ATG PAM silencing edit) |
| 1148 | TGGGATCAGGCTTCCACCTTGG (SEQ ID NO: 1148) | RTT (AAG-to-AGG PAM silencing edit) |
| 1149 | TGGGATCAGGCTTCCACGTTGG (SEQ ID NO: 1149) | RTT (AAG-to-ACG PAM silencing edit) |
| 1150 | TGGGATCAGGCTTCCACTTTGG (SEQ ID NO: 1150) | RTT |
| 1151 | ATGGGATCAGGCTTCCACATTGG (SEQ ID NO: | RTT (AAG-to-ATG PAM silencing edit) |
| | 1151) | |
| 1152 | ATGGGATCAGGCTTCCACCTTGG (SEQ ID NO: | RTT (AAG-to-AGG PAM silencing edit) |
| | 1152) | |
| 1153 | ATGGGATCAGGCTTCCACGTTGG (SEQ ID NO: | RTT (AAG-to-ACG PAM silencing edit) |
| | 1153) | |
| 1154 | ATGGGATCAGGCTTCCACTTTGG (SEQ ID NO: | RTT |
| | 1154) | |
| 1155 | TATGGGATCAGGCTTCCACATTGG (SEQ ID NO: | RTT (AAG-to-ATG PAM silencing edit) |
| | 1155) | |
| 1156 | TATGGGATCAGGCTTCCACCTTGG (SEQ ID NO: | RTT (AAG-to-AGG PAM silencing edit) |
| | 1156) | |
| 1157 | TATGGGATCAGGCTTCCACGTTGG (SEQ ID NO: | RTT (AAG-to-ACG PAM silencing edit) |
| | 1157) | |
| 1158 | TATGGGATCAGGCTTCCACTTTGG (SEQ ID NO: | RTT |
| | 1158) | |
| 1159 | GTATGGGATCAGGCTTCCACATTGG (SEQ ID NO: | RTT (AAG-to-ATG PAM silencing edit) |
| | 1159) | |
| 1160 | GTATGGGATCAGGCTTCCACCTTGG (SEQ ID NO: | RTT (AAG-to-AGG PAM silencing edit) |
| | 1160) | |
| 1161 | GTATGGGATCAGGCTTCCACGTTGG (SEQ ID NO: | RTT (AAG-to-ACG PAM silencing edit) |
| | 1161) | |
| 1162 | GTATGGGATCAGGCTTCCACTTTGG (SEQ ID NO: | RTT |
| | 1162) | |
| 1163 | TGTATGGGATCAGGCTTCCACATTGG (SEQ ID | RTT (AAG-to-ATG PAM silencing edit) |
| | NO: 1163) | |
| 1164 | TGTATGGGATCAGGCTTCCACCTTGG (SEQ ID | RTT (AAG-to-AGG PAM silencing edit) |
| | NO: 1164) | |
| 1165 | TGTATGGGATCAGGCTTCCACGTTGG (SEQ ID | RTT (AAG-to-ACG PAM silencing edit) |
| | NO: 1165) | |
| 1166 | TGTATGGGATCAGGCTTCCACTTTGG (SEQ ID NO: | RTT |
| | 1166) | |
| 1167 | CTGTATGGGATCAGGCTTCCACATTGG (SEQ ID | RTT (AAG-to-ATG PAM silencing edit) |
| | NO: 1167) | |
| 1168 | CTGTATGGGATCAGGCTTCCACCTTGG (SEQ ID | RTT (AAG-to-AGG PAM silencing edit) |
| | NO: 1168) | |
| 1169 | CTGTATGGGATCAGGCTTCCACGTTGG (SEQ ID | RTT (AAG-to-ACG PAM silencing edit) |
| | NO: 1169) | |
| 1170 | CTGTATGGGATCAGGCTTCCACTTTGG (SEQ ID | RTT |
| | NO: 1170) | |
| 1171 | TCTGTATGGGATCAGGCTTCCACATTGG (SEQ ID | RTT (AAG-to-ATG PAM silencing edit) |
| | NO: 1171) | |
| 1172 | TCTGTATGGGATCAGGCTTCCACCTTGG (SEQ ID | RTT (AAG-to-AGG PAM silencing edit) |
| | NO: 1172) | |
| 1173 | TCTGTATGGGATCAGGCTTCCACGTTGG (SEQ ID | RTT (AAG-to-ACG PAM silencing edit) |
| | NO: 1173) | |
| 1174 | TCTGTATGGGATCAGGCTTCCACTTTGG (SEQ ID | RTT |
| | NO: 1174) | |
| 1175 | TTCTGTATGGGATCAGGCTTCCACATTGG (SEQ ID | RTT (AAG-to-ATG PAM silencing edit) |
| | NO: 1175) | |
| 1176 | TTCTGTATGGGATCAGGCTTCCACCTTGG (SEQ ID | RTT (AAG-to-AGG PAM silencing edit) |
| | NO: 1176) | |
| 1177 | TTCTGTATGGGATCAGGCTTCCACGTTGG (SEQ ID | RTT (AAG-to-ACG PAM silencing edit) |
| | NO: 1177) | |
| 1178 | TTCTGTATGGGATCAGGCTTCCACTTTGG (SEQ ID | RTT |
| | NO: 1178) | |
| 1179 | TTTCTGTATGGGATCAGGCTTCCACATTGG (SEQ | RTT (AAG-to-ATG PAM silencing edit) |
| | ID NO: 1179) | |
| 1180 | TTTCTGTATGGGATCAGGCTTCCACCTTGG (SEQ | RTT (AAG-to-AGG PAM silencing edit) |
| | ID NO: 1180) | |
| 1181 | TTTCTGTATGGGATCAGGCTTCCACGTTGG (SEQ | RTT (AAG-to-ACG PAM silencing edit) |
| | ID NO: 1181) | |
| 1182 | TTTCTGTATGGGATCAGGCTTCCACTTTGG (SEQ | RTT |
| | ID NO: 1182) | |
| 1183 | CTTTCTGTATGGGATCAGGCTTCCACATTGG (SEQ | RTT (AAG-to-ATG PAM silencing edit) |
| | ID NO: 1183) | |
| 1184 | CTTTCTGTATGGGATCAGGCTTCCACCTTGG (SEQ | RTT (AAG-to-AGG PAM silencing edit) |
| | ID NO: 1184) | |
| 1185 | CTTTCTGTATGGGATCAGGCTTCCACGTTGG (SEQ | RTT (AAG-to-ACG PAM silencing edit) |
| | ID NO: 1185) | |
| 1186 | CTTTCTGTATGGGATCAGGCTTCCACTTTGG (SEQ | RTT |
| | ID NO: 1186) | |
| 1187 | GCTTTCTGTATGGGATCAGGCTTCCACATTGG | RTT (AAG-to-ATG PAM silencing edit) |
| | (SEQ ID NO: 1187) | |
| 1188 | GCTTTCTGTATGGGATCAGGCTTCCACCTTGG | RTT (AAG-to-AGG PAM silencing edit) |
| | (SEQ ID NO: 1188) | |
| 1189 | GCTTTCTGTATGGGATCAGGCTTCCACGTTGG | RTT (AAG-to-ACG PAM silencing edit) |
| | (SEQ ID NO: 1189) | |
| 1190 | GCTTTCTGTATGGGATCAGGCTTCCACTTTGG | RTT |
| | (SEQ ID NO: 1190) | |
| 1191 | AGCTTTCTGTATGGGATCAGGCTTCCACATTGG | RTT (AAG-to-ATG PAM silencing edit) |
| | (SEQ ID NO: 1191) | |
| 1192 | AGCTTTCTGTATGGGATCAGGCTTCCACCTTGG | RTT (AAG-to-AGG PAM silencing edit) |
| | (SEQ ID NO: 1192) | |
| 1193 | AGCTTTCTGTATGGGATCAGGCTTCCACGTTGG | RTT (AAG-to-ACG PAM silencing edit) |
| | (SEQ ID NO: 1193) | |
| 1194 | AGCTTTCTGTATGGGATCAGGCTTCCACTTTGG | RTT |
| | (SEQ ID NO: 1194) | |
| 1195 | AAGCTTTCTGTATGGGATCAGGCTTCCACATTGG | RTT (AAG-to-ATG PAM silencing edit) |
| | (SEQ ID NO: 1195) | |
| 1196 | AAGCTTTCTGTATGGGATCAGGCTTCCACCTTGG | RTT (AAG-to-AGG PAM silencing edit) |
| | (SEQ ID NO: 1196) | |
| 1197 | AAGCTTTCTGTATGGGATCAGGCTTCCACGTTGG | RTT (AAG-to-ACG PAM silencing edit) |
| | (SEQ ID NO: 1197) | |
| 1198 | AAGCTTTCTGTATGGGATCAGGCTTCCACTTTGG | RTT |
| | (SEQ ID NO: 1198) | |
| 1199 | GAAGCTTTCTGTATGGGATCAGGCTTCCACATTG | RTT (AAG-to-ATG PAM silencing edit) |
| | G (SEQ ID NO: 1199) | |
| 1200 | GAAGCTTTCTGTATGGGATCAGGCTTCCACCTTG | RTT (AAG-to-AGG PAM silencing edit) |
| | G (SEQ ID NO: 1200) | |
| 1201 | GAAGCTTTCTGTATGGGATCAGGCTTCCACGTTG | RTT (AAG-to-ACG PAM silencing edit) |
| | G (SEQ ID NO: 1201) | |
| 1202 | GAAGCTTTCTGTATGGGATCAGGCTTCCACTTTG | RTT |
| | G (SEQ ID NO: 1202) | |
| 1203 | AGAAGCTTTCTGTATGGGATCAGGCTTCCACATT | RTT (AAG-to-ATG PAM silencing edit) |
| | GG (SEQ ID NO: 1203) | |
| 1204 | AGAAGCTTTCTGTATGGGATCAGGCTTCCACCTT | RTT (AAG-to-AGG PAM silencing edit) |
| | GG (SEQ ID NO: 1204) | |
| 1205 | AGAAGCTTTCTGTATGGGATCAGGCTTCCACGTT | RTT (AAG-to-ACG PAM silencing edit) |
| | GG (SEQ ID NO: 1205) | |
| 1206 | AGAAGCTTTCTGTATGGGATCAGGCTTCCACTTT | RTT |
| | GG (SEQ ID NO: 1206) | |
| 1207 | CAGAAGCTTTCTGTATGGGATCAGGCTTCCACAT | RTT (AAG-to-ATG PAM silencing edit) |
| | TGG (SEQ ID NO: 1207) | |
| 1208 | CAGAAGCTTTCTGTATGGGATCAGGCTTCCACCT | RTT (AAG-to-AGG PAM silencing edit) |
| | TGG (SEQ ID NO: 1208) | |
| 1209 | CAGAAGCTTTCTGTATGGGATCAGGCTTCCACGT | RTT (AAG-to-ACG PAM silencing edit) |
| | TGG (SEQ ID NO: 1209) | |
| 1210 | CAGAAGCTTTCTGTATGGGATCAGGCTTCCACTT | RTT |
| | TGG (SEQ ID NO: 1210) | |
| 1211 | GCAGAAGCTTTCTGTATGGGATCAGGCTTCCACA | RTT (AAG-to-ATG PAM silencing edit) |
| | TTGG (SEQ ID NO: 1211) | |
| 1212 | GCAGAAGCTTTCTGTATGGGATCAGGCTTCCACC | RTT (AAG-to-AGG PAM silencing edit) |
| | TTGG (SEQ ID NO: 1212) | |
| 1213 | GCAGAAGCTTTCTGTATGGGATCAGGCTTCCACG | RTT (AAG-to-ACG PAM silencing edit) |
| | TTGG (SEQ ID NO: 1213) | |
| 1214 | GCAGAAGCTTTCTGTATGGGATCAGGCTTCCACT | RTT |
| | TTGG (SEQ ID NO: 1214) | |
| 1215 | TGCAGAAGCTTTCTGTATGGGATCAGGCTTCCAC | RTT (AAG-to-ATG PAM silencing edit) |
| | ATTGG (SEQ ID NO: 1215) | |
| 1216 | TGCAGAAGCTTTCTGTATGGGATCAGGCTTCCAC | RTT (AAG-to-AGG PAM silencing edit) |
| | CTTGG (SEQ ID NO: 1216) | |
| 1217 | TGCAGAAGCTTTCTGTATGGGATCAGGCTTCCAC | RTT (AAG-to-ACG PAM silencing edit) |
| | GTTGG (SEQ ID NO: 1217) | |
| 1218 | TGCAGAAGCTTTCTGTATGGGATCAGGCTTCCAC | RTT |
| | TTTGG (SEQ ID NO: 1218) | |
| 1219 | ATGCAGAAGCTTTCTGTATGGGATCAGGCTTCCA | RTT (AAG-to-ATG PAM silencing edit) |
| | CATTGG (SEQ ID NO: 1219) | |
| 1220 | ATGCAGAAGCTTTCTGTATGGGATCAGGCTTCCA | RTT (AAG-to-AGG PAM silencing edit) |
| | CCTTGG (SEQ ID NO: 1220) | |
| 1221 | ATGCAGAAGCTTTCTGTATGGGATCAGGCTTCCA | RTT (AAG-to-ACG PAM silencing edit) |
| | CGTTGG (SEQ ID NO: 1221) | |
| 1222 | ATGCAGAAGCTTTCTGTATGGGATCAGGCTTCCA | RTT |
| | CTTTGG (SEQ ID NO: 1222) | |
| 127 | AGAAGCTTTCTGTATGGGAT (SEQ ID NO: 127) | PE3b ngRNA spacer (CAG PAM) |
| 1223 | ATCACCTTTTCGCTTTTTCC (SEQ ID NO: 1223) | PE3 ngRNA spacer (AAG PAM) |
| 418 | ATTATCAGTTTTGGATGCAG (SEQ ID NO: 418) | PE3 ngRNA spacer (AAG PAM) |
| 1224 | CAAGATGGCTCAAGATTCAG (SEQ ID NO: 1224) | PE3 ngRNA spacer (TAG PAM) |
| 1225 | CGCTTTTTCCAAGATGGCTC (SEQ ID NO: 1225) | PE3 ngRNA spacer (AAG PAM) |
| 1226 | GTGATTATCAGTTTTGGATG (SEQ ID NO: 1226) | PE3 ngRNA spacer (CAG PAM) |
| 1227 | GTGCTGGACAGGCTGCTGTG (SEQ ID NO: 1227) | PE3 ngRNA spacer (AAG PAM) |
| 1228 | TAGATCTTTCTTGTGATTAT (SEQ ID NO: 1228) | PE3 ngRNA spacer (CAG PAM) |
| 1229 | TTCCAAGATGGCTCAAGATT (SEQ ID NO: 1229) | PE3 ngRNA spacer (CAG PAM) |

TABLE 18

| Sequence | | |
|---|---|---|
| Number | Sequence | Description |
| 1230 | TTGCTGGGTTTCCAAAG (SEQ ID NO: 1230) | PEgRNA spacer (TG; TGG PAM) |
| 1231 | CTTGCTGGGTTTCCAAAG (SEQ ID NO: 1231) | PERNA spacer (TG; TGG PAM) |
| 1232 | TCTTGCTGGGTTTCCAAAG (SEQ ID NO: 1232) | PERNA spacer (TG; TGG PAM) |
| 212 | GTCTTGCTGGGTTTCCAAAG (SEQ ID NO: 212) | PEgRNA spacer (TG; TGG PAM) |
| 1233 | TGTCTTGCTGGGTTTCCAAAG (SEQ ID NO: 1233) | PEgRNA spacer (TG; TGG PAM) |
| 1234 | GTGTCTTGCTGGGTTTCCAAAG | PEgRNA spacer (TG; TGG PAM) |
| | (SEQ ID NO: 1234) | |
| 1235 | TGGAA | PBS |
| 1236 | TGGAAA | PBS |
| 1237 | TGGAAAC | PBS |
| 1238 | TGGAAACC | PBS |
| 1239 | TGGAAACCC | PBS |
| 1240 | TGGAAACCCA (SEQ ID NO: 1240) | PBS |
| 1241 | TGGAAACCCAG (SEQ ID NO: 1241) | PBS |
| 1242 | TGGAAACCCAGC (SEQ ID NO: 1242) | PBS |
| 1243 | TGGAAACCCAGCA (SEQ ID NO: 1243) | PBS |
| 1244 | TGGAAACCCAGCAA (SEQ ID NO: 1244) | PBS |
| 1245 | TGGAAACCCAGCAAG (SEQ ID NO: 1245) | PBS |
| 1246 | TGGAAACCCAGCAAGA (SEQ ID NO: 1246) | PBS |
| 1247 | TGGAAACCCAGCAAGAC (SEQ ID NO: 1247) | PBS |
| 1248 | TGGAAACCCAGCAAGACA (SEQ ID NO: 1248) | PBS |
| 1249 | TGGAAACCCAGCAAGACAC (SEQ ID NO: 1249) | PBS |
| 1250 | GATCAGGCTAGCACTT (SEQ ID NO: 1250) | RTT*2, 8 (TGG-to-TGC PAM silencing edit) |
| 1251 | GATCAGGCTAGTACTT (SEQ ID NO: 1251) | RTT*1, 3, 8, 9 (TG-to-TA; TGG-to-TAC PAM |
| | | silencing edit) |
| 1252 | GATCAGGCTTCAACTT (SEQ ID NO: 1252) | RTT*1, 4, 8, 10 (TG-to-TT; TGG-to-TTG PAM |
| | | silencing edit) |
| 1253 | GATCAGGCTTCCACTT (SEQ ID NO: 1253) | RTT*1, 5, 8, 11 |
| 1254 | GATCAGGCTTCGACTT (SEQ ID NO: 1254) | RTT*1, 6, 8, 12 (TG-to-TC; TGG-to-TCG PAM |
| | | silencing edit) |
| 1255 | GATCAGGCTTCTACTT (SEQ ID NO: 1255) | RTT*1, 7, 8, 13 (TG-to-TA; TGG-to-TAG PAM |
| | | silencing edit) |
| 1256 | GGATCAGGCTAGCACTT (SEQ ID NO: 1256) | RTT*2, 8 (TGG-to-TGC PAM silencing edit) |
| 1257 | GGATCAGGCTAGTACTT (SEQ ID NO: 1257) | RTT*1, 3, 8, 9 (TG-to-TA; TGG-to-TAC PAM |
| | | silencing edit) |
| 1258 | GGATCAGGCTTCAACTT (SEQ ID NO: 1258) | RTT*1, 4, 8, 10 (TG-to-TT; TGG-to-TTG PAM |
| | | silencing edit) |
| 1259 | GGATCAGGCTTCCACTT (SEQ ID NO: 1259) | RTT*1, 5, 8, 11 |
| 1260 | GGATCAGGCTTCGACTT (SEQ ID NO: 1260) | RTT*1, 6, 8, 12 (TG-to-TC; TGG-to-TCG PAM |
| | | silencing edit) |
| 1261 | GGATCAGGCTTCTACTT (SEQ ID NO: 1261) | RTT*1, 7, 8, 13 (TG-to-TA; TGG-to-TAG PAM |
| | | silencing edit) |
| 1262 | GGGATCAGGCTAGCACTT (SEQ ID NO: 1262) | RTT*2, 8 (TGG-to-TGC PAM silencing edit) |
| 1263 | GGGATCAGGCTAGTACTT (SEQ ID NO: 1263) | RTT*1, 3, 8, 9 (TG-to-TA; TGG-to-TAC PAM |
| | | silencing edit) |
| 1264 | GGGATCAGGCTTCAACTT (SEQ ID NO: 1264) | RTT*1, 4, 8, 10 (TG-to-TT; TGG-to-TTG PAM |
| | | silencing edit) |
| 1265 | GGGATCAGGCTTCCACTT (SEQ ID NO: 1265) | RTT*1, 5, 8, 11 |
| 1266 | GGGATCAGGCTTCGACTT (SEQ ID NO: 1266) | RTT*1, 6, 8, 12 (TG-to-TC; TGG-to-TCG PAM |
| | | silencing edit) |
| 1267 | GGGATCAGGCTTCTACTT (SEQ ID NO: 1267) | RTT*1, 7, 8, 13 (TG-to-TA; TGG-to-TAG PAM |
| | | silencing edit) |
| 1268 | TGGGATCAGGCTAGCACTT (SEQ ID NO: 1268) | RTT*2, 8 (TGG-to-TGC PAM silencing edit) |
| 1269 | TGGGATCAGGCTAGTACTT (SEQ ID NO: 1269) | RTT*1, 3, 8, 9 (TG-to-TA; TGG-to-TAC PAM |
| | | silencing edit) |
| 1270 | TGGGATCAGGCTTCAACTT (SEQ ID NO: 1270) | RTT*1, 4, 8, 10 (TG-to-TT; TGG-to-TTG PAM |
| | | silencing edit) |
| 1271 | TGGGATCAGGCTTCCACTT (SEQ ID NO: 1271) | RTT*1, 5, 8, 11 |
| 1272 | TGGGATCAGGCTTCGACTT (SEQ ID NO: 1272) | RTT*1, 6, 8, 12 (TG-to-TC; TGG-to-TCG PAM |
| | | silencing edit) |
| 1273 | TGGGATCAGGCTTCTACTT (SEQ ID NO: 1273) | RTT*1, 7, 8, 13 (TG-to-TA; TGG-to-TAG PAM |
| | | silencing edit) |
| 1274 | ATGGGATCAGGCTAGCACTT (SEQ ID NO: 1274) | RTT*2, 8 (TGG-to-TGC PAM silencing edit) |
| 1275 | ATGGGATCAGGCTAGTACTT (SEQ ID NO: 1275) | RTT*1, 3, 8, 9 (TG-to-TA; TGG-to-TAC PAM |
| | | silencing edit) |
| 1276 | ATGGGATCAGGCTTCAACTT (SEQ ID NO: 1276) | RTT*1, 4, 8, 10 (TG-to-TT; TGG-to-TTG PAM |
| | | silencing edit) |
| 28 | ATGGGATCAGGCTTCCACTT (SEQ ID NO: 28) | RTT*1, 5, 8, 11 |
| 1277 | ATGGGATCAGGCTTCGACTT (SEQ ID NO: 1277) | RTT*1, 6, 8, 12 (TG-to-TC; TGG-to-TCG PAM |
| | | silencing edit) |
| 1278 | ATGGGATCAGGCTTCTACTT (SEQ ID NO: 1278) | RTT*1, 7, 8, 13 (TG-to-TA; TGG-to-TAG PAM |
| | | silencing edit) |
| 1279 | TATGGGATCAGGCTAGCACTT (SEQ ID NO: 1279) | RTT*2, 8 (TGG-to-TGC PAM silencing edit) |
| 1280 | TATGGGATCAGGCTAGTACTT (SEQ ID NO: 1280) | RTT*1, 3, 8, 9 (TG-to-TA; TGG-to-TAC PAM |
| | | silencing edit) |
| 1281 | TATGGGATCAGGCTTCAACTT (SEQ ID NO: 1281) | RTT*1, 4, 8, 10 (TG-to-TT; TGG-to-TTG PAM |
| | | silencing edit) |
| 1282 | TATGGGATCAGGCTTCCACTT (SEQ ID NO: 1282) | RTT*1, 5, 8, 11 |
| 1283 | TATGGGATCAGGCTTCGACTT (SEQ ID NO: 1283) | RTT*1, 6, 8, 12 (TG-to-TC; TGG-to-TCG PAM |
| | | silencing edit) |
| 1284 | TATGGGATCAGGCTTCTACTT (SEQ ID NO: 1284) | RTT*1, 7, 8, 13 (TG-to-TA; TGG-to-TAG PAM |
| | | silencing edit) |
| 1285 | GTATGGGATCAGGCTAGCACTT (SEQ ID NO: | RTT*2, 8 (TGG-to-TGC PAM silencing edit) |
| | 1285) | |
| 1286 | GTATGGGATCAGGCTAGTACTT (SEQ ID NO: 1286) | RTT*1, 3, 8, 9 (TG-to-TA; TGG-to-TAC PAM |
| | | silencing edit) |
| 1287 | GTATGGGATCAGGCTTCAACTT (SEQ ID NO: 1287) | RTT*1, 4, 8, 10 (TG-to-TT; TGG-to-TTG PAM |
| | | silencing edit) |
| 1288 | GTATGGGATCAGGCTTCCACTT (SEQ ID NO: 1288) | RTT*1, 5, 8, 11 |
| 1289 | GTATGGGATCAGGCTTCGACTT (SEQ ID NO: 1289) | RTT*1, 6, 8, 12 (TG-to-TC; TGG-to-TCG PAM |
| | | silencing edit) |
| 1290 | GTATGGGATCAGGCTTCTACTT (SEQ ID NO: 1290) | RTT*1, 7, 8, 13 (TG-to-TA; TGG-to-TAG PAM |
| | | silencing edit) |
| 1291 | TGTATGGGATCAGGCTAGCACTT (SEQ ID NO: | RTT*2, 8 (TGG-to-TGC PAM silencing edit) |
| | 1291) | |
| 1292 | TGTATGGGATCAGGCTAGTACTT (SEQ ID NO: | RTT*1, 3, 8, 9 (TG-to-TA; TGG-to-TAC PAM |
| | 1292) | silencing edit) |
| 1293 | TGTATGGGATCAGGCTTCAACTT (SEQ ID NO: | RTT*1, 4, 8, 10 (TG-to-TT; TGG-to-TTG PAM |
| | 1293) | silencing edit) |
| 1294 | TGTATGGGATCAGGCTTCCACTT (SEQ ID NO: | RTT*1, 5, 8, 11 |
| | 1294) | |
| 1295 | TGTATGGGATCAGGCTTCGACTT (SEQ ID NO: | RTT*1, 6, 8, 12 (TG-to-TC; TGG-to-TCG PAM |
| | 1295) | silencing edit) |
| 1296 | TGTATGGGATCAGGCTTCTACTT (SEQ ID NO: | RTT*1, 7, 8, 13 (TG-to-TA; TGG-to-TAG PAM |
| | 1296) | silencing edit) |
| 1297 | CTGTATGGGATCAGGCTAGCACTT (SEQ ID NO: | RTT*2, 8 (TGG-to-TGC PAM silencing edit) |
| | 1297) | |
| 1298 | CTGTATGGGATCAGGCTAGTACTT (SEQ ID NO: | RTT*1, 3, 8, 9 (TG-to-TA; TGG-to-TAC PAM |
| | 1298) | silencing edit) |
| 1299 | CTGTATGGGATCAGGCTTCAACTT (SEQ ID NO: | RTT*1, 4, 8, 10 (TG-to-TT; TGG-to-TTG PAM |
| | 1299) | silencing edit) |
| 1300 | CTGTATGGGATCAGGCTTCCACTT (SEQ ID NO: | RTT*1, 5, 8, 11 |
| | 1300) | |
| 1301 | CTGTATGGGATCAGGCTTCGACTT (SEQ ID NO: | RTT*1, 6, 8, 12 (TG-to-TC; TGG-to-TCG PAM |
| | 1301) | silencing edit) |
| 1302 | CTGTATGGGATCAGGCTTCTACTT (SEQ ID NO: | RTT*1, 7, 8, 13 (TG-to-TA; TGG-to-TAG PAM |
| | 1302) | silencing edit) |
| 1303 | TCTGTATGGGATCAGGCTAGCACTT (SEQ ID NO: | RTT*2, 8 (TGG-to-TGC PAM silencing edit) |
| | 1303) | |
| 1304 | TCTGTATGGGATCAGGCTAGTACTT (SEQ ID NO: | RTT*1, 3, 8, 9 (TG-to-TA; TGG-to-TAC PAM |
| | 1304) | silencing edit) |
| 1305 | TCTGTATGGGATCAGGCTTCAACTT (SEQ ID NO: | RTT*1, 4, 8, 10 (TG-to-TT; TGG-to-TTG PAM |
| | 1305) | silencing edit) |
| 1306 | TCTGTATGGGATCAGGCTTCCACTT (SEQ ID NO: | RTT*1, 5, 8, 11 |
| | 1306) | |
| 1307 | TCTGTATGGGATCAGGCTTCGACTT (SEQ ID NO: | RTT*1, 6, 8, 12 (TG-to-TC; TGG-to-TCG PAM |
| | 1307) | silencing edit) |
| 1308 | TCTGTATGGGATCAGGCTTCTACTT (SEQ ID NO: | RTT*1, 7, 8, 13 (TG-to-TA; TGG-to-TAG PAM |
| | 1308) | silencing edit) |
| 1309 | TTCTGTATGGGATCAGGCTAGCACTT (SEQ ID NO: | RTT*2, 8 (TGG-to-TGC PAM silencing edit) |
| | 1309) | |
| 1310 | TTCTGTATGGGATCAGGCTAGTACTT (SEQ ID NO: | RTT*1, 3, 8, 9 (TG-to-TA; TGG-to-TAC PAM |
| | 1310) | silencing edit) |
| 1311 | TTCTGTATGGGATCAGGCTTCAACTT (SEQ ID NO: | RTT*1, 4, 8, 10 (TG-to-TT; TGG-to-TTG PAM |
| | 1311) | silencing edit) |
| 1312 | TTCTGTATGGGATCAGGCTTCCACTT (SEQ ID NO: | RTT*1, 5, 8, 11 |
| | 1312) | |
| 1313 | TTCTGTATGGGATCAGGCTTCGACTT (SEQ ID NO: | RTT*1, 6, 8, 12 (TG-to-TC; TGG-to-TCG PAM |
| | 1313) | silencing edit) |
| 1314 | TTCTGTATGGGATCAGGCTTCTACTT (SEQ ID NO: | RTT*1, 7, 8, 13 (TG-to-TA; TGG-to-TAG PAM |
| | 1314) | silencing edit) |
| 1315 | TTTCTGTATGGGATCAGGCTAGCACTT (SEQ ID | RTT*2, 8 (TGG-to-TGC PAM silencing edit) |
| | NO: 1315) | |
| 1316 | TTTCTGTATGGGATCAGGCTAGTACTT (SEQ ID | RTT*1, 3, 8, 9 (TG-to-TA; TGG-to-TAC PAM |
| | NO: 1316) | silencing edit) |
| 1317 | TTTCTGTATGGGATCAGGCTTCAACTT (SEQ ID | RTT*1, 4, 8, 10 (TG-to-TT; TGG-to-TTG PAM |
| | NO: 1317) | silencing edit) |
| 1318 | TTTCTGTATGGGATCAGGCTTCCACTT (SEQ ID | RTT*1, 5, 8, 11 |
| | NO: 1318) | |
| 1319 | TTTCTGTATGGGATCAGGCTTCGACTT (SEQ ID | RTT*1, 6, 8, 12 (TG-to-TC; TGG-to-TCG PAM |
| | NO: 1319) | silencing edit) |
| 1320 | TTTCTGTATGGGATCAGGCTTCTACTT (SEQ ID | RTT*1, 7, 8, 13 (TG-to-TA; TGG-to-TAG PAM |
| | NO: 1320) | silencing edit) |
| 1321 | CTTTCTGTATGGGATCAGGCTAGCACTT (SEQ ID | RTT*2, 8 (TGG-to-TGC PAM silencing edit) |
| | NO: 1321) | |
| 1322 | CTTTCTGTATGGGATCAGGCTAGTACTT (SEQ ID | RTT*1, 3, 8, 9 (TG-to-TA; TGG-to-TAC PAM |
| | NO: 1322) | silencing edit) |
| 1323 | CTTTCTGTATGGGATCAGGCTTCAACTT (SEQ ID | RTT*1, 4, 8, 10 (TG-to-TT; TGG-to-TTG PAM |
| | NO: 1323) | silencing edit) |
| 1324 | CTTTCTGTATGGGATCAGGCTTCCACTT (SEQ ID | RTT*1, 5, 8, 11 |
| | NO: 1324) | |
| 1325 | CTTTCTGTATGGGATCAGGCTTCGACTT (SEQ ID | RTT*1, 6, 8, 12 (TG-to-TC; TGG-to-TCG PAM |
| | NO: 1325) | silencing edit) |
| 1326 | CTTTCTGTATGGGATCAGGCTTCTACTT (SEQ ID | RTT*1, 7, 8, 13 (TG-to-TA; TGG-to-TAG PAM |
| | NO: 1326) | silencing edit) |
| 1327 | GCTTTCTGTATGGGATCAGGCTAGCACTT (SEQ ID | RTT*2, 8 (TGG-to-TGC PAM silencing edit) |
| | NO: 1327) | |
| 1328 | GCTTTCTGTATGGGATCAGGCTAGTACTT (SEQ ID | RTT*1, 3, 8, 9 (TG-to-TA; TGG-to-TAC PAM |
| | NO: 1328) | silencing edit) |
| 1329 | GCTTTCTGTATGGGATCAGGCTTCAACTT (SEQ ID | RTT*1, 4, 8, 10 (TG-to-TT; TGG-to-TTG PAM |
| | NO: 1329) | silencing edit) |
| 1330 | GCTTTCTGTATGGGATCAGGCTTCCACTT (SEQ ID | RTT*1, 5, 8, 11 |
| | NO: 1330) | |
| 1331 | GCTTTCTGTATGGGATCAGGCTTCGACTT (SEQ ID | RTT*1, 6, 8, 12 (TG-to-TC; TGG-to-TCG PAM |
| | NO: 1331) | silencing edit) |
| 1332 | GCTTTCTGTATGGGATCAGGCTTCTACTT (SEQ ID | RTT*1, 7, 8, 13 (TG-to-TA; TGG-to-TAG PAM |
| | NO: 1332) | silencing edit) |
| 1333 | AGCTTTCTGTATGGGATCAGGCTAGCACTT (SEQ | RTT*2, 8 (TGG-to-TGC PAM silencing edit) |
| | ID NO: 1333) | |
| 1334 | AGCTTTCTGTATGGGATCAGGCTAGTACTT (SEQ | RTT*1, 3, 8, 9 (TG-to-TA; TGG-to-TAC PAM |
| | ID NO: 1334) | silencing edit) |
| 1335 | AGCTTTCTGTATGGGATCAGGCTTCAACTT (SEQ | RTT*1, 4, 8, 10 (TG-to-TT; TGG-to-TTG PAM |
| | ID NO: 1335) | silencing edit) |
| 1336 | AGCTTTCTGTATGGGATCAGGCTTCCACTT (SEQ | RTT*1, 5, 8, 11 |
| | ID NO: 1336) | |
| 1337 | AGCTTTCTGTATGGGATCAGGCTTCGACTT (SEQ | RTT*1, 6, 8, 12 (TG-to-TC; TGG-to-TCG PAM |
| | ID NO: 1337) | silencing edit) |
| 1338 | AGCTTTCTGTATGGGATCAGGCTTCTACTT (SEQ | RTT*1, 7, 8, 13 (TG-to-TA; TGG-to-TAG PAM |
| | ID NO: 1338) | silencing edit) |
| 1339 | AAGCTTTCTGTATGGGATCAGGCTAGCACTT | RTT*2, 8 (TGG-to-TGC PAM silencing edit) |
| | (SEQ ID NO: 1339) | |
| 1340 | AAGCTTTCTGTATGGGATCAGGCTAGTACTT | RTT*1, 3, 8, 9 (TG-to-TA; TGG-to-TAC PAM |
| | (SEQ ID NO: 1340) | silencing edit) |
| 1341 | AAGCTTTCTGTATGGGATCAGGCTTCAACTT (SEQ | RTT*1, 4, 8, 10 (TG-to-TT; TGG-to-TTG PAM |
| | ID NO: 1341) | silencing edit) |
| 1342 | AAGCTTTCTGTATGGGATCAGGCTTCCACTT (SEQ | RTT*1, 5, 8, 11 |
| | ID NO: 1342) | |
| 1343 | AAGCTTTCTGTATGGGATCAGGCTTCGACTT (SEQ | RTT*1, 6, 8, 12 (TG-to-TC; TGG-to-TCG PAM |
| | ID NO: 1343) | silencing edit) |
| 1344 | AAGCTTTCTGTATGGGATCAGGCTTCTACTT (SEQ | RTT*1, 7, 8, 13 (TG-to-TA; TGG-to-TAG PAM |
| | ID NO: 1344) | silencing edit) |
| 1345 | GAAGCTTTCTGTATGGGATCAGGCTAGCACTT | RTT*2, 8 (TGG-to-TGC PAM silencing edit) |
| | (SEQ ID NO: 1345) | |
| 1346 | GAAGCTTTCTGTATGGGATCAGGCTAGTACTT | RTT*1, 3, 8, 9 (TG-to-TA; TGG-to-TAC PAM |
| | (SEQ ID NO: 1346) | silencing edit) |
| 1347 | GAAGCTTTCTGTATGGGATCAGGCTTCAACTT | RTT*1, 4, 8, 10 (TG-to-TT; TGG-to-TTG PAM |
| | (SEQ ID NO: 1347) | silencing edit) |
| 1348 | GAAGCTTTCTGTATGGGATCAGGCTTCCACTT | RTT*1, 5, 8, 11 |
| | (SEQ ID NO: 1348) | |
| 1349 | GAAGCTTTCTGTATGGGATCAGGCTTCGACTT | RTT*1, 6, 8, 12 (TG-to-TC; TGG-to-TCG PAM |
| | (SEQ ID NO: 1349) | silencing edit) |
| 1350 | GAAGCTTTCTGTATGGGATCAGGCTTCTACTT | RTT*1, 7, 8, 13 (TG-to-TA; TGG-to-TAG PAM |
| | (SEQ ID NO: 1350) | silencing edit) |
| 1351 | AGAAGCTTTCTGTATGGGATCAGGCTAGCACTT | RTT*2, 8 (TGG-to-TGC PAM silencing edit) |
| | (SEQ ID NO: 1351) | |
| 1352 | AGAAGCTTTCTGTATGGGATCAGGCTAGTACTT | RTT*1, 3, 8, 9 (TG-to-TA; TGG-to-TAC PAM |
| | (SEQ ID NO: 1352) | silencing edit) |
| 1353 | AGAAGCTTTCTGTATGGGATCAGGCTTCAACTT | RTT*1, 4, 8, 10 (TG-to-TT; TGG-to-TTG PAM |
| | (SEQ ID NO: 1353) | silencing edit) |
| 1354 | AGAAGCTTTCTGTATGGGATCAGGCTTCCACTT | RTT*1, 5, 8, 11 |
| | (SEQ ID NO: 1354) | |
| 1355 | AGAAGCTTTCTGTATGGGATCAGGCTTCGACTT | RTT*1, 6, 8, 12 (TG-to-TC; TGG-to-TCG PAM |
| | SEQ ID NO: 1355) | silencing edit) |
| 1356 | AGAAGCTTTCTGTATGGGATCAGGCTTCTACTT | RTT*1, 7, 8, 13 (TG-to-TA; TGG-to-TAG PAM |
| | (SEQ ID NO: 1356) | silencing edit) |
| 1357 | CAGAAGCTTTCTGTATGGGATCAGGCTAGCACTT | RTT*2, 8 (TGG-to-TGC PAM silencing edit) |
| | (SEQ ID NO: 1357) | |
| 1358 | CAGAAGCTTTCTGTATGGGATCAGGCTAGTACTT | RTT*1, 3, 8, 9 (TG-to-TA; TGG-to-TAC PAM |
| | (SEQ ID NO: 1358) | silencing edit) |
| 1359 | CAGAAGCTTTCTGTATGGGATCAGGCTTCAACTT | RTT*1, 4, 8, 10 (TG-to-TT; TGG-to-TTG PAM |
| | (SEQ ID NO: 1359) | silencing edit) |
| 1360 | CAGAAGCTTTCTGTATGGGATCAGGCTTCCACTT | RTT*1, 5, 8, 11 |
| | (SEQ ID NO: 1360) | |
| 1361 | CAGAAGCTTTCTGTATGGGATCAGGCTTCGACTT | RTT*1, 6, 8, 12 (TG-to-TC; TGG-to-TCG PAM |
| | (SEQ ID NO: 1361) | silencing edit) |
| 1362 | CAGAAGCTTTCTGTATGGGATCAGGCTTCTACTT | RTT*1, 7, 8, 13 (TG-to-TA; TGG-to-TAG PAM |
| | (SEQ ID NO: 1362) | silencing edit) |
| 1363 | GCAGAAGCTTTCTGTATGGGATCAGGCTAGCACT | RTT*2, 8 (TGG-to-TGC PAM silencing edit) |
| | T (SEQ ID NO: 1363) | |
| 1364 | GCAGAAGCTTTCTGTATGGGATCAGGCTAGTACT | RTT*1, 3, 8, 9 (TG-to-TA; TGG-to-TAC PAM |
| | T (SEQ ID NO: 1364) | silencing edit) |
| 1365 | GCAGAAGCTTTCTGTATGGGATCAGGCTTCAACT | RTT*1, 4, 8, 10 (TG-to-TT; TGG-to-TTG PAM |
| | T (SEQ ID NO: 1365) | silencing edit) |
| 1366 | GCAGAAGCTTTCTGTATGGGATCAGGCTTCCACT | RTT*1, 5, 8, 11 |
| | T (SEQ ID NO: 1366) | |
| 1367 | GCAGAAGCTTTCTGTATGGGATCAGGCTTCGACT | RTT*1, 6, 8, 12 (TG-to-TC; TGG-to-TCG PAM |
| | T (SEQ ID NO: 1367) | silencing edit) |
| 1368 | GCAGAAGCTTTCTGTATGGGATCAGGCTTCTACT | RTT*1, 7, 8, 13 (TG-to-TA; TGG-to-TAG PAM |
| | T (SEQ ID NO: 1368) | silencing edit) |
| 1369 | TGCAGAAGCTTTCTGTATGGGATCAGGCTAGCAC | RTT*2, 8 (TGG-to-TGC PAM silencing edit) |
| | TT (SEQ ID NO: 1369) | |
| 1370 | TGCAGAAGCTTTCTGTATGGGATCAGGCTAGTAC | RTT*1, 3, 8, 9 (TG-to-TA; TGG-to-TAC PAM |
| | TT (SEQ ID NO: 1370) | silencing edit) |
| 1371 | TGCAGAAGCTTTCTGTATGGGATCAGGCTTCAAC | RTT*1, 4, 8, 10 (TG-to-TT; TGG-to-TTG PAM |
| | TT (SEQ ID NO: 1371) | silencing edit) |
| 1372 | TGCAGAAGCTTTCTGTATGGGATCAGGCTTCCAC | RTT*1, 5, 8, 11 |
| | TT (SEQ ID NO: 1372) | |
| 1373 | TGCAGAAGCTTTCTGTATGGGATCAGGCTTCGAC | RTT*1, 6, 8, 12 (TG-to-TC; TGG-to-TCG PAM |
| | TT (SEQ ID NO: 1373) | silencing edit) |
| 1374 | TGCAGAAGCTTTCTGTATGGGATCAGGCTTCTAC | RTT*1, 7, 8, 13 (TG-to-TA; TGG-to-TAG PAM |
| | TT (SEQ ID NO: 1374) | silencing edit) |
| 1375 | ATGCAGAAGCTTTCTGTATGGGATCAGGCTAGCA | RTT*2, 8 (TGG-to-TGC PAM silencing edit) |
| | CTT (SEQ ID NO: 1375) | |
| 1376 | ATGCAGAAGCTTTCTGTATGGGATCAGGCTAGTA | RTT*1, 3, 8, 9 (TG-to-TA; TGG-to-TAC PAM |
| | CTT (SEQ ID NO: 1376) | silencing edit) |
| 1377 | ATGCAGAAGCTTTCTGTATGGGATCAGGCTTCAA | RTT*1, 4, 8, 10 (TG-to-TT; TGG-to-TTG PAM |
| | CTT (SEQ ID NO: 1377) | silencing edit) |
| 1378 | ATGCAGAAGCTTTCTGTATGGGATCAGGCTTCCA | RTT*1, 5, 8, 11 |
| | CTT (SEQ ID NO: 1378) | |
| 1379 | ATGCAGAAGCTTTCTGTATGGGATCAGGCTTCGA | RTT*1, 6, 8, 12 (TG-to-TC; TGG-to-TCG PAM |
| | CTT (SEQ ID NO: 1379) | silencing edit) |
| 1380 | ATGCAGAAGCTTTCTGTATGGGATCAGGCTTCTA | RTT*1, 7, 8, 13 (TG-to-TA; TGG-to-TAG PAM |
| | CTT (SEQ ID NO: 1380) | silencing edit) |
| 1381 | GATGCAGAAGCTTTCTGTATGGGATCAGGCTAGC | RTT*2, 8 (TGG-to-TGC PAM silencing edit) |
| | ACTT (SEQ ID NO: 1381) | |
| 1382 | GATGCAGAAGCTTTCTGTATGGGATCAGGCTAGT | RTT*1, 3, 8, 9 (TG-to-TA; TGG-to-TAC PAM |
| | ACTT (SEQ ID NO: 1382) | silencing edit) |
| 1383 | GATGCAGAAGCTTTCTGTATGGGATCAGGCTTCA | RTT*1, 4, 8, 10 (TG-to-TT; TGG-to-TTG PAM |
| | ACTT (SEQ ID NO: 1383) | silencing edit) |
| 1384 | GATGCAGAAGCTTTCTGTATGGGATCAGGCTTCC | RTT*1, 5, 8, 11 |
| | ACTT (SEQ ID NO: 1384) | |
| 1385 | GATGCAGAAGCTTTCTGTATGGGATCAGGCTTCG | RTT*1, 6, 8, 12 (TG-to-TC; TGG-to-TCG PAM |
| | ACTT (SEQ ID NO: 1385) | silencing edit) |
| 1386 | GATGCAGAAGCTTTCTGTATGGGATCAGGCTTCT | RTT*1, 7, 8, 13 (TG-to-TA; TGG-to-TAG PAM |
| | ACTT (SEQ ID NO: 1386) | silencing edit) |
| 1387 | GGATGCAGAAGCTTTCTGTATGGGATCAGGCTAG | RTT*2, 8 (TGG-to-TGC PAM silencing edit) |
| | CACTT (SEQ ID NO: 1387) | |
| 1388 | GGATGCAGAAGCTTTCTGTATGGGATCAGGCTAG | RTT*1, 3, 8, 9 (TG-to-TA; TGG-to-TAC PAM |
| | TACTT (SEQ ID NO: 1388) | silencing edit) |
| 1389 | GGATGCAGAAGCTTTCTGTATGGGATCAGGCTTC | RTT*1, 4, 8, 10 (TG-to-TT; TGG-to-TTG PAM |
| | AACTT (SEQ ID NO: 1389) | silencing edit) |
| 1390 | GGATGCAGAAGCTTTCTGTATGGGATCAGGCTTC | RTT*1, 5, 8, 11 |
| | CACTT (SEQ ID NO: 1390) | |
| 1391 | GGATGCAGAAGCTTTCTGTATGGGATCAGGCTTC | RTT*1, 6, 8, 12 (TG-to-TC; TGG-to-TCG PAM |
| | GACTT (SEQ ID NO: 1391) | silencing edit) |
| 1392 | GGATGCAGAAGCTTTCTGTATGGGATCAGGCTTC | RTT*1, 7, 8, 13 (TG-to-TA; TGG-to-TAG PAM |
| | TACTT (SEQ ID NO: 1392) | silencing edit) |
| 1393 | TGGATGCAGAAGCTTTCTGTATGGGATCAGGCTA | RTT*2, 8 (TGG-to-TGC PAM silencing edit) |
| | GCACTT (SEQ ID NO: 1393) | |
| 1394 | TGGATGCAGAAGCTTTCTGTATGGGATCAGGCTA | RTT*1, 3, 8, 9 (TG-to-TA; TGG-to-TAC PAM |
| | GTACTT (SEQ ID NO: 1394) | silencing edit) |
| 1395 | TGGATGCAGAAGCTTTCTGTATGGGATCAGGCTT | RTT*1, 4, 8, 10 (TG-to-TT; TGG-to-TTG PAM |
| | CAACTT (SEQ ID NO: 1395) | silencing edit) |
| 1396 | TGGATGCAGAAGCTTTCTGTATGGGATCAGGCTT | RTT*1, 5, 8, 11 |
| | CCACTT (SEQ ID NO: 1396) | |
| 1397 | TGGATGCAGAAGCTTTCTGTATGGGATCAGGCTT | RTT*1, 6, 8, 12 (TG-to-TC; TGG-to-TCG PAM |
| | CGACTT (SEQ ID NO: 1397) | silencing edit) |
| 1398 | TGGATGCAGAAGCTTTCTGTATGGGATCAGGCTT | RTT*1, 7, 8, 13 (TG-to-TA; TGG-to-TAG PAM |
| | CTACTT (SEQ ID NO: 1398) | silencing edit) |
| 24 | AAGATGGCTCAAGATTCAGT (SEQ ID NO: 24) | PE3 ngRNA spacer (AG PAM) |
| 25 | AAGATTCAGTAGATCTTTCT (SEQ ID NO: 25) | PE3 ngRNA spacer (TG PAM) |
| 26 | AAGCTTTCTGTATGGGATCA (SEQ ID NO: 26) | PE3b*1 ngRNA spacer (GG PAM) |
| 27 | AGATCTTTCTTGTGATTATC (SEQ ID NO: 27) | PE3 ngRNA spacer (AG PAM) |
| 1274 | ATGGGATCAGGCTAGCACTT (SEQ ID NO: 1274) | PE3b*2 ngRNA spacer (TGG PAM) |
| 1275 | ATGGGATCAGGCTAGTACTT (SEQ ID NO: 1275) | PE3b*3 ngRNA spacer (TG; TGG PAM) |
| 1276 | ATGGGATCAGGCTTCAACTT (SEQ ID NO: 1276) | PE3b*4 ngRNA spacer (TG; TGG PAM) |
| 28 | ATGGGATCAGGCTTCCACTT (SEQ ID NO: 28) | PE3b*5 ngRNA spacer (TG; TGG PAM) |
| 1277 | ATGGGATCAGGCTTCGACTT (SEQ ID NO: 1277) | PE3b*6 ngRNA spacer (TG; TGG PAM) |
| 1278 | ATGGGATCAGGCTTCTACTT (SEQ ID NO: 1278) | PE3b*7 ngRNA spacer (TG; TGG PAM) |
| 1108 | CAGTGCTGGACAGGCTGCTG (SEQ ID NO: 1108) | PE3 ngRNA spacer (TG PAM) |
| 29 | CCTTTTCGCTTTTTCCAAGA (SEQ ID NO: 29) | PE3 ngRNA spacer (TG; TGG PAM) |
| 1110 | CTGGACAGGCTGCTGTGAAG (SEQ ID NO: 1110) | PE3 ngRNA spacer (GG PAM) |
| 30 | CTTTTCGCTTTTTCCAAGAT (SEQ ID NO: 30) | PE3 ngRNA spacer (GG PAM) |
| 31 | GAAGCTTTCTGTATGGGATC (SEQ ID NO: 31) | PE3b*8 ngRNA spacer (AG; AGG PAM) |
| 32 | GATGCAGAAGCTTTCTGTAT (SEQ ID NO: 32) | PE3 ngRNA spacer (GG PAM) |
| 33 | GATTCAGTAGATCTTTCTTG (SEQ ID NO: 33) | PE3 ngRNA spacer (TG PAM) |
| 1111 | GCTGGACAGGCTGCTGTGAA (SEQ ID NO: 1111) | PE3 ngRNA spacer (GG; GGG PAM) |
| 34 | GCTTTTTCCAAGATGGCTCA (SEQ ID NO: 34) | PE3 ngRNA spacer (AG PAM) |
| 35 | GGATGCAGAAGCTTTCTGTA (SEQ ID NO: 35) | PE3 ngRNA spacer (TG; TGG PAM) |
| 37 | GTGAAGGGACATCACCTTTT (SEQ ID NO: 37) | PE3 ngRNA spacer (CG PAM) |
| 38 | TCACCTTTTCGCTTTTTCCA (SEQ ID NO: 38) | PE3 ngRNA spacer (AG PAM) |
| 39 | TCCAAGATGGCTCAAGATTC (SEQ ID NO: 39) | PE3 ngRNA spacer (AG PAM) |
| 41 | TGATTATCAGTTTTGGATGC (SEQ ID NO: 41) | PE3 ngRNA spacer (AG PAM) |
| 1113 | TGCTGGACAGGCTGCTGTGA (SEQ ID NO: 1113) | PE3 ngRNA spacer (AG; AGG PAM) |
| 1399 | TGGGATCAGGCTAGTACTTT (SEQ ID NO: 1399) | PE3b*9 ngRNA spacer (GG PAM) |
| 1400 | TGGGATCAGGCTTCAACTTT (SEQ ID NO: 1400) | PE3b*10 ngRNA spacer (GG PAM) |
| 43 | TGGGATCAGGCTTCCACTTT (SEQ ID NO: 43) | PE3b*11 ngRNA spacer (GG PAM) |
| 1401 | TGGGATCAGGCTTCGACTTT (SEQ ID NO: 1401) | PE3b*12 ngRNA spacer (GG PAM) |
| 1402 | TGGGATCAGGCTTCTACTTT (SEQ ID NO: 1402) | PE3b*13 ngRNA spacer (GG PAM) |
| 44 | TTATCAGTTTTGGATGCAGA (SEQ ID NO: 44) | PE3 ngRNA spacer (AG PAM) |
| 1114 | TTCAGTGCTGGACAGGCTGC (SEQ ID NO: 1114) | PE3 ngRNA spacer (TG PAM) |
| 45 | TTCTTGTGATTATCAGTTTT (SEQ ID NO: 45) | PE3 ngRNA spacer (GG PAM) |
| 46 | TTGTGATTATCAGTTTTGGA (SEQ ID NO: 46) | PE3 ngRNA spacer (TG PAM) |
| 47 | TTTCTTGTGATTATCAGTTT (SEQ ID NO: 47) | PE3 ngRNA spacer (TG; TGG PAM) |
| 48 | TTTTGGATGCAGAAGCTTTC (SEQ ID NO: 48) | PE3 ngRNA spacer (TG PAM) |
| 1403 | GTCTTGCTGGGTTTCCAAAGGTTTTAGAGCTAGA | pegRNA*1, 5, 8, 11 |
| | AATAGCAAGTTAAAATAAGGCTAGTCCGTTATCA | |
| | ACTTGAAAAAGTGGCACCGAGTCGGTGCATGGG | |
| | ATCAGGCTTCCACTTTGGAAACC (SEQ ID NO: | |
| | 1403) | |
| 1404 | GTCTTGCTGGGTTTCCAAAGGTTTTAGAGCTAGA | pegRNA*1, 5, 8, 11 |
| | AATAGCAAGTTAAAATAAGGCTAGTCCGTTATCA | |
| | ACTTGAAAAAGTGGCACCGAGTCGGTGCATGGG | |
| | ATCAGGCTTCCACTTTGGAAACCCA (SEQ ID NO: | |
| | 1404) | |
| 1405 | GTCTTGCTGGGTTTCCAAAGGTTTTAGAGCTAGA | pegRNA*1, 5, 8, 11 |
| | AATAGCAAGTTAAAATAAGGCTAGTCCGTTATCA | |
| | ACTTGAAAAAGTGGCACCGAGTCGGTGCGTATG | |
| | GGATCAGGCTTCCACTTTGGAAACC (SEQ ID NO: | |
| | 1405) | |
| 1406 | GTCTTGCTGGGTTTCCAAAGGTTTTAGAGCTAGA | pegRNA*1, 5, 8, 11 |
| | AATAGCAAGTTAAAATAAGGCTAGTCCGTTATCA | |
| | ACTTGAAAAAGTGGCACCGAGTCGGTGCATGGG | |
| | ATCAGGCTTCCACTTTGGAAACCCAGC (SEQ ID | |
| | NO: 1406) | |
| 1407 | GTCTTGCTGGGTTTCCAAAGGTTTTAGAGCTAGA | pegRNA*1, 5, 8, 11 |
| | AATAGCAAGTTAAAATAAGGCTAGTCCGTTATCA | |
| | ACTTGAAAAAGTGGCACCGAGTCGGTGCGTATG | |
| | GGATCAGGCTTCCACTTTGGAAACCCA (SEQ ID | |
| | NO: 1407) | |
| 1408 | GTCTTGCTGGGTTTCCAAAGGTTTTAGAGCTAGA | pegRNA*1, 5, 8, 11, contains 3′ TTTT |
| | AATAGCAAGTTAAAATAAGGCTAGTCCGTTATCA | |
| | ACTTGAAAAAGTGGCACCGAGTCGGTGCATGGG | |
| | ATCAGGCTTCCACTTTGGAAACCTTTT (SEQ ID | |
| | NO: 1408) | |
| 1409 | GTCTTGCTGGGTTTCCAAAGGTTTTAGAGCTAGA | pegRNA*1, 5, 8, 11 |
| | AATAGCAAGTTAAAATAAGGCTAGTCCGTTATCA | |
| | ACTTGAAAAAGTGGCACCGAGTCGGTGCTCTGTA | |
| | TGGGATCAGGCTTCCACTTTGGAAACC (SEQ ID | |
| | NO: 1409) | |
| 1410 | GTCTTGCTGGGTTTCCAAAGGTTTTAGAGCTAGA | pegRNA*1, 5, 8, 11 |
| | AATAGCAAGTTAAAATAAGGCTAGTCCGTTATCA | |
| | ACTTGAAAAAGTGGCACCGAGTCGGTGCATGGG | |
| | ATCAGGCTTCCACTTTGGAAACCCAGCAA (SEQ | |
| | ID NO: 1410) | |
| 1411 | GTCTTGCTGGGTTTCCAAAGGTTTTAGAGCTAGA | pegRNA*1, 5, 8, 11 |
| | AATAGCAAGTTAAAATAAGGCTAGTCCGTTATCA | |
| | ACTTGAAAAAGTGGCACCGAGTCGGTGCGTATG | |
| | GGATCAGGCTTCCACTTTGGAAACCCAGC (SEQ | |
| | ID NO: 1411) | |
| 1412 | GTCTTGCTGGGTTTCCAAAGGTTTTAGAGCTAGA | pegRNA*1, 5, 8, 11, contains 3′ TTTT |
| | AATAGCAAGTTAAAATAAGGCTAGTCCGTTATCA | |
| | ACTTGAAAAAGTGGCACCGAGTCGGTGCATGGG | |
| | ATCAGGCTTCCACTTTGGAAACCCATTTT (SEQ ID | |
| | NO: 1412) | |
| 1413 | GTCTTGCTGGGTTTCCAAAGGTTTTAGAGCTAGA | pegRNA*1, 5, 8, 11, contains 3′ TTTT |
| | AATAGCAAGTTAAAATAAGGCTAGTCCGTTATCA | |
| | ACTTGAAAAAGTGGCACCGAGTCGGTGCGTATG | |
| | GGATCAGGCTTCCACTTTGGAAACCTTTT (SEQ ID | |
| | NO: 1413) | |
| 1414 | GTCTTGCTGGGTTTCCAAAGGTTTTAGAGCTAGA | pegRNA*1, 5, 8, 11 |
| | AATAGCAAGTTAAAATAAGGCTAGTCCGTTATCA | |
| | ACTTGAAAAAGTGGCACCGAGTCGGTGCTCTGTA | |
| | TGGGATCAGGCTTCCACTTTGGAAACCCA (SEQ | |
| | ID NO: 1414) | |
| 1415 | GTCTTGCTGGGTTTCCAAAGGTTTTAGAGCTAGA | pegRNA*1, 5, 8, 11 |
| | AATAGCAAGTTAAAATAAGGCTAGTCCGTTATCA | |
| | ACTTGAAAAAGTGGCACCGAGTCGGTGCTTTCTG | |
| | TATGGGATCAGGCTTCCACTTTGGAAACC (SEQ | |
| | ID NO: 1415) | |
| 1416 | GTCTTGCTGGGTTTCCAAAGGTTTTAGAGCTAGA | pegRNA*1, 5, 8, 11 |
| | AATAGCAAGTTAAAATAAGGCTAGTCCGTTATCA | |
| | ACTTGAAAAAGTGGCACCGAGTCGGTGCGTATG | |
| | GGATCAGGCTTCCACTTTGGAAACCCAGCAA | |
| | (SEQ ID NO: 1416) | |
| 1417 | GTCTTGCTGGGTTTCCAAAGGTTTTAGAGCTAGA | pegRNA*1, 5, 8, 11, contains 3′ TTTT |
| | AATAGCAAGTTAAAATAAGGCTAGTCCGTTATCA | |
| | ACTTGAAAAAGTGGCACCGAGTCGGTGCATGGG | |
| | ATCAGGCTTCCACTTTGGAAACCCAGCTTTT (SEQ | |
| | ID NO: 1417) | |
| 1418 | GTCTTGCTGGGTTTCCAAAGGTTTTAGAGCTAGA | pegRNA*1, 5, 8, 11, contains 3′ TTTT |
| | AATAGCAAGTTAAAATAAGGCTAGTCCGTTATCA | |
| | ACTTGAAAAAGTGGCACCGAGTCGGTGCGTATG | |
| | GGATCAGGCTTCCACTTTGGAAACCCATTTT (SEQ | |
| | ID NO: 1418) | |
| 1419 | GTCTTGCTGGGTTTCCAAAGGTTTTAGAGCTAGA | pegRNA*1, 5, 8, 11 |
| | AATAGCAAGTTAAAATAAGGCTAGTCCGTTATCA | |
| | ACTTGAAAAAGTGGCACCGAGTCGGTGCTCTGTA | |
| | TGGGATCAGGCTTCCACTTTGGAAACCCAGC | |
| | (SEQ ID NO: 1419) | |
| 1420 | GTCTTGCTGGGTTTCCAAAGGTTTTAGAGCTAGA | pegRNA*1, 5, 8, 11 |
| | AATAGCAAGTTAAAATAAGGCTAGTCCGTTATCA | |
| | ACTTGAAAAAGTGGCACCGAGTCGGTGCTTTCTG | |
| | TATGGGATCAGGCTTCCACTTTGGAAACCCA | |
| | (SEQ ID NO: 1420) | |
| 1421 | GTCTTGCTGGGTTTCCAAAGGTTTTAGAGCTAGA | pegRNA*1, 5, 8, 11 |
| | AATAGCAAGTTAAAATAAGGCTAGTCCGTTATCA | |
| | ACTTGAAAAAGTGGCACCGAGTCGGTGCGCTTTC | |
| | TGTATGGGATCAGGCTTCCACTTTGGAAACC | |
| | (SEQ ID NO: 1421) | |
| 1422 | GTCTTGCTGGGTTTCCAAAGGTTTTAGAGCTAGA | pegRNA*1, 5, 8, 11, contains 3′ TTTT |
| | AATAGCAAGTTAAAATAAGGCTAGTCCGTTATCA | |
| | ACTTGAAAAAGTGGCACCGAGTCGGTGCTCTGTA | |
| | TGGGATCAGGCTTCCACTTTGGAAACCTTTT (SEQ | |
| | ID NO: 1422) | |
| 1423 | GTCTTGCTGGGTTTCCAAAGGTTTTAGAGCTAGA | pegRNA*1, 5, 8, 11, contains 3′ TTTT |
| | AATAGCAAGTTAAAATAAGGCTAGTCCGTTATCA | |
| | ACTTGAAAAAGTGGCACCGAGTCGGTGCATGGG | |
| | ATCAGGCTTCCACTTTGGAAACCCAGCAATTTT | |
| | (SEQ ID NO: 1423) | |
| 1424 | GTCTTGCTGGGTTTCCAAAGGTTTTAGAGCTAGA | pegRNA*1, 5, 8, 11, contains 3′ TTTT |
| | AATAGCAAGTTAAAATAAGGCTAGTCCGTTATCA | |
| | ACTTGAAAAAGTGGCACCGAGTCGGTGCGTATG | |
| | GGATCAGGCTTCCACTTTGGAAACCCAGCTTTT | |
| | (SEQ ID NO: 1424) | |
| 1425 | GTCTTGCTGGGTTTCCAAAGGTTTTAGAGCTAGA | pegRNA*1, 5, 8, 11 |
| | AATAGCAAGTTAAAATAAGGCTAGTCCGTTATCA | |
| | ACTTGAAAAAGTGGCACCGAGTCGGTGCTCTGTA | |
| | TGGGATCAGGCTTCCACTTTGGAAACCCAGCAA | |
| | (SEQ ID NO: 1425) | |
| 1426 | GTCTTGCTGGGTTTCCAAAGGTTTTAGAGCTAGA | pegRNA*1, 5, 8, 11 |
| | AATAGCAAGTTAAAATAAGGCTAGTCCGTTATCA | |
| | ACTTGAAAAAGTGGCACCGAGTCGGTGCTTTCTG | |
| | TATGGGATCAGGCTTCCACTTTGGAAACCCAGC | |
| | (SEQ ID NO: 1426) | |
| 1427 | GTCTTGCTGGGTTTCCAAAGGTTTTAGAGCTAGA | pegRNA*1, 5, 8, 11 |
| | AATAGCAAGTTAAAATAAGGCTAGTCCGTTATCA | |
| | ACTTGAAAAAGTGGCACCGAGTCGGTGCGCTTTC | |
| | TGTATGGGATCAGGCTTCCACTTTGGAAACCCA | |
| | (SEQ ID NO: 1427) | |
| 1428 | GTCTTGCTGGGTTTCCAAAGGTTTTAGAGCTAGA | pegRNA*1, 5, 8, 11, contains 3′ TTTT |
| | AATAGCAAGTTAAAATAAGGCTAGTCCGTTATCA | |
| | ACTTGAAAAAGTGGCACCGAGTCGGTGCTCTGTA | |
| | TGGGATCAGGCTTCCACTTTGGAAACCCATTTT | |
| | (SEQ ID NO: 1428) | |
| 1429 | GTCTTGCTGGGTTTCCAAAGGTTTTAGAGCTAGA | pegRNA*1, 5, 8, 11, contains 3′ TTTT |
| | AATAGCAAGTTAAAATAAGGCTAGTCCGTTATCA | |
| | ACTTGAAAAAGTGGCACCGAGTCGGTGCTTTCTG | |
| | TATGGGATCAGGCTTCCACTTTGGAAACCTTTT | |
| | (SEQ ID NO: 1429) | |
| 1430 | GTCTTGCTGGGTTTCCAAAGGTTTTAGAGCTAGA | pegRNA*1, 5, 8, 11, contains 3′ TTTT |
| | AATAGCAAGTTAAAATAAGGCTAGTCCGTTATCA | |
| | ACTTGAAAAAGTGGCACCGAGTCGGTGCGTATG | |
| | GGATCAGGCTTCCACTTTGGAAACCCAGCAATTT | |
| | T (SEQ ID NO: 1430) | |
| 1431 | GTCTTGCTGGGTTTCCAAAGGTTTTAGAGCTAGA | pegRNA*1, 5, 8, 11 |
| | AATAGCAAGTTAAAATAAGGCTAGTCCGTTATCA | |
| | ACTTGAAAAAGTGGCACCGAGTCGGTGCTTTCTG | |
| | TATGGGATCAGGCTTCCACTTTGGAAACCCAGCA | |
| | A (SEQ ID NO: 1431) | |
| 1432 | GTCTTGCTGGGTTTCCAAAGGTTTTAGAGCTAGA | pegRNA*1, 5, 8, 11 |
| | AATAGCAAGTTAAAATAAGGCTAGTCCGTTATCA | |
| | ACTTGAAAAAGTGGCACCGAGTCGGTGCGCTTTC | |
| | TGTATGGGATCAGGCTTCCACTTTGGAAACCCAG | |
| | C (SEQ ID NO: 1432) | |
| 1433 | GTCTTGCTGGGTTTCCAAAGGTTTTAGAGCTAGA | pegRNA*1, 5, 8, 11, contains 3′ TTTT |
| | AATAGCAAGTTAAAATAAGGCTAGTCCGTTATCA | |
| | ACTTGAAAAAGTGGCACCGAGTCGGTGCTCTGTA | |
| | TGGGATCAGGCTTCCACTTTGGAAACCCAGCTTT | |
| | T (SEQ ID NO: 1433) | |
| 1434 | GTCTTGCTGGGTTTCCAAAGGTTTTAGAGCTAGA | pegRNA*1, 5, 8, 11, contains 3′ TTTT |
| | AATAGCAAGTTAAAATAAGGCTAGTCCGTTATCA | |
| | ACTTGAAAAAGTGGCACCGAGTCGGTGCTTTCTG | |
| | TATGGGATCAGGCTTCCACTTTGGAAACCCATTT | |
| | T (SEQ ID NO: 1434) | |
| 1435 | GTCTTGCTGGGTTTCCAAAGGTTTTAGAGCTAGA | pegRNA*1, 5, 8, 11, contains 3′ TTTT |
| | AATAGCAAGTTAAAATAAGGCTAGTCCGTTATCA | |
| | ACTTGAAAAAGTGGCACCGAGTCGGTGCGCTTTC | |
| | TGTATGGGATCAGGCTTCCACTTTGGAAACCTTT | |
| | T (SEQ ID NO: 1435) | |
| 1436 | GTCTTGCTGGGTTTCCAAAGGTTTTAGAGCTAGA | pegRNA*1, 5, 8, 11 |
| | AATAGCAAGTTAAAATAAGGCTAGTCCGTTATCA | |
| | ACTTGAAAAAGTGGCACCGAGTCGGTGCGCTTTC | |
| | TGTATGGGATCAGGCTTCCACTTTGGAAACCCAG | |
| | CAA (SEQ ID NO: 1436) | |
| 1437 | GTCTTGCTGGGTTTCCAAAGGTTTTAGAGCTAGA | pegRNA*1, 5, 8, 11, contains 3′ TTTT |
| | AATAGCAAGTTAAAATAAGGCTAGTCCGTTATCA | |
| | ACTTGAAAAAGTGGCACCGAGTCGGTGCTCTGTA | |
| | TGGGATCAGGCTTCCACTTTGGAAACCCAGCAAT | |
| | TTT (SEQ ID NO: 1437) | |
| 1438 | GTCTTGCTGGGTTTCCAAAGGTTTTAGAGCTAGA | pegRNA*1, 5, 8, 11, contains 3′ TTTT |
| | AATAGCAAGTTAAAATAAGGCTAGTCCGTTATCA | |
| | ACTTGAAAAAGTGGCACCGAGTCGGTGCTTTCTG | |
| | TATGGGATCAGGCTTCCACTTTGGAAACCCAGCT | |
| | TTT (SEQ ID NO: 1438) | |
| 1439 | GTCTTGCTGGGTTTCCAAAGGTTTTAGAGCTAGA | pegRNA*1, 5, 8, 11, contains 3′ TTTT |
| | AATAGCAAGTTAAAATAAGGCTAGTCCGTTATCA | |
| | ACTTGAAAAAGTGGCACCGAGTCGGTGCGCTTTC | |
| | TGTATGGGATCAGGCTTCCACTTTGGAAACCCAT | |
| | TTT (SEQ ID NO: 1439) | |
| 1440 | GTCTTGCTGGGTTTCCAAAGGTTTTAGAGCTAGA | pegRNA*1, 5, 8, 11, contains 3′ TTTT |
| | AATAGCAAGTTAAAATAAGGCTAGTCCGTTATCA | |
| | ACTTGAAAAAGTGGCACCGAGTCGGTGCTTTCTG | |
| | TATGGGATCAGGCTTCCACTTTGGAAACCCAGCA | |
| | ATTTT (SEQ ID NO: 1440) | |
| 1441 | GTCTTGCTGGGTTTCCAAAGGTTTTAGAGCTAGA | pegRNA*1, 5, 8, 11, contains 3′ TTTT |
| | AATAGCAAGTTAAAATAAGGCTAGTCCGTTATCA | |
| | ACTTGAAAAAGTGGCACCGAGTCGGTGCGCTTTC | |
| | TGTATGGGATCAGGCTTCCACTTTGGAAACCCAG | |
| | CTTTT (SEQ ID NO: 1441) | |
| 1442 | GTCTTGCTGGGTTTCCAAAGGTTTTAGAGCTAGA | pegRNA*1, 5, 8, 11, contains 3′ TTTT |
| | AATAGCAAGTTAAAATAAGGCTAGTCCGTTATCA | |
| | ACTTGAAAAAGTGGCACCGAGTCGGTGCGCTTTC | |
| | TGTATGGGATCAGGCTTCCACTTTGGAAACCCAG | |
| | CAATTTT (SEQ ID NO: 1442) | |
| 1443 | GTCTTGCTGGGTTTCCAAAGGTTTTAGAGCTAGA | pegRNA*1, 5, 8, 11, contains linker |
| | AATAGCAAGTTAAAATAAGGCTAGTCCGTTATCA | sequence AACATTGA; hairpin SEQ ID |
| | ACTTGAAAAAGTGGCACCGAGTCGGTGCATGGG | NO: 3591; 3′ TTTT |
| | ATCAGGCTTCCACTTTGGAAACCAACATTGACGC | |
| | GTCTCTACGTGGGGGCGCGTTTT (SEQ ID NO: | |
| | 1443) | |
| 1444 | GTCTTGCTGGGTTTCCAAAGGTTTTAGAGCTAGA | pegRNA*1, 5, 8, 11, contains linker |
| | AATAGCAAGTTAAAATAAGGCTAGTCCGTTATCA | sequence AACATTGA; hairpin SEQ ID |
| | ACTTGAAAAAGTGGCACCGAGTCGGTGCATGGG | NO: 3591; 3′ TTTT |
| | ATCAGGCTTCCACTTTGGAAACCCAAACATTGAC | |
| | GCGTCTCTACGTGGGGGCGCGTTTT (SEQ ID NO: | |
| | 1444) | |
| 1445 | GTCTTGCTGGGTTTCCAAAGGTTTTAGAGCTAGA | pegRNA*1, 5, 8, 11, contains linker |
| | AATAGCAAGTTAAAATAAGGCTAGTCCGTTATCA | sequence AACATTGA; hairpin SEQ ID |
| | ACTTGAAAAAGTGGCACCGAGTCGGTGCGTATG | NO: 3591; 3′ TTTT |
| | GGATCAGGCTTCCACTTTGGAAACCAACATTGAC | |
| | GCGTCTCTACGTGGGGGCGCGTTTT (SEQ ID NO: | |
| | 1445) | |
| 1446 | GTCTTGCTGGGTTTCCAAAGGTTTTAGAGCTAGA | pegRNA*1, 5, 8, 11, contains linker |
| | AATAGCAAGTTAAAATAAGGCTAGTCCGTTATCA | sequence AACATTGA; hairpin SEQ ID |
| | ACTTGAAAAAGTGGCACCGAGTCGGTGCATGGG | NO: 3591; 3′ TTTT |
| | ATCAGGCTTCCACTTTGGAAACCCAGCAACATTG | |
| | ACGCGTCTCTACGTGGGGGCGCGTTTT (SEQ ID | |
| | NO: 1446) | |
| 1447 | GTCTTGCTGGGTTTCCAAAGGTTTTAGAGCTAGA | pegRNA*1, 5, 8, 11, contains linker |
| | AATAGCAAGTTAAAATAAGGCTAGTCCGTTATCA | sequence AACATTGA; hairpin SEQ ID |
| | ACTTGAAAAAGTGGCACCGAGTCGGTGCGTATG | NO: 3591; 3′ TTTT |
| | GGATCAGGCTTCCACTTTGGAAACCCAAACATTG | |
| | ACGCGTCTCTACGTGGGGGCGCGTTTT (SEQ ID | |
| | NO: 1447) | |
| 1448 | GTCTTGCTGGGTTTCCAAAGGTTTTAGAGCTAGA | pegRNA*1, 5, 8, 11, contains linker |
| | AATAGCAAGTTAAAATAAGGCTAGTCCGTTATCA | sequence AACATTGA; hairpin SEQ ID |
| | ACTTGAAAAAGTGGCACCGAGTCGGTGCTCTGTA | NO: 3591; 3′ TTTT |
| | TGGGATCAGGCTTCCACTTTGGAAACCAACATTG | |
| | ACGCGTCTCTACGTGGGGGCGCGTTTT (SEQ ID | |
| | NO: 1448) | |
| 1449 | GTCTTGCTGGGTTTCCAAAGGTTTTAGAGCTAGA | pegRNA*1, 5, 8, 11, contains linker |
| | AATAGCAAGTTAAAATAAGGCTAGTCCGTTATCA | sequence AACATTGA; hairpin SEQ ID |
| | ACTTGAAAAAGTGGCACCGAGTCGGTGCATGGG | NO: 3591; 3′ TTTT |
| | ATCAGGCTTCCACTTTGGAAACCCAGCAAAACAT | |
| | TGACGCGTCTCTACGTGGGGGCGCGTTTT (SEQ | |
| | ID NO: 1449) | |
| 1450 | GTCTTGCTGGGTTTCCAAAGGTTTTAGAGCTAGA | pegRNA*1, 5, 8, 11, contains linker |
| | AATAGCAAGTTAAAATAAGGCTAGTCCGTTATCA | sequence AACATTGA; hairpin SEQ ID |
| | ACTTGAAAAAGTGGCACCGAGTCGGTGCGTATG | NO: 3591; 3′ TTTT |
| | GGATCAGGCTTCCACTTTGGAAACCCAGCAACAT | |
| | TGACGCGTCTCTACGTGGGGGCGCGTTTT (SEQ | |
| | ID NO: 1450) | |
| 1451 | GTCTTGCTGGGTTTCCAAAGGTTTTAGAGCTAGA | pegRNA*1, 5, 8, 11, contains linker |
| | AATAGCAAGTTAAAATAAGGCTAGTCCGTTATCA | sequence AACATTGA; hairpin SEQ ID |
| | ACTTGAAAAAGTGGCACCGAGTCGGTGCTCTGTA | NO: 3591; 3′ TTTT |
| | TGGGATCAGGCTTCCACTTTGGAAACCCAAACAT | |
| | TGACGCGTCTCTACGTGGGGGCGCGTTTT (SEQ | |
| | ID NO: 1451) | |
| 1452 | GTCTTGCTGGGTTTCCAAAGGTTTTAGAGCTAGA | pegRNA*1, 5, 8, 11, contains linker |
| | AATAGCAAGTTAAAATAAGGCTAGTCCGTTATCA | sequence AACATTGA; hairpin SEQ ID |
| | ACTTGAAAAAGTGGCACCGAGTCGGTGCTTTCTG | NO: 3591; 3′ TTTT |
| | TATGGGATCAGGCTTCCACTTTGGAAACCAACAT | |
| | TGACGCGTCTCTACGTGGGGGCGCGTTTT (SEQ | |
| | ID NO: 1452) | |
| 1453 | GTCTTGCTGGGTTTCCAAAGGTTTTAGAGCTAGA | pegRNA*1, 5, 8, 11, contains linker |
| | AATAGCAAGTTAAAATAAGGCTAGTCCGTTATCA | sequence AACATTGA; hairpin SEQ ID |
| | ACTTGAAAAAGTGGCACCGAGTCGGTGCGTATG | NO: 3591; 3′ TTTT |
| | GGATCAGGCTTCCACTTTGGAAACCCAGCAAAA | |
| | CATTGACGCGTCTCTACGTGGGGGCGCGTTTT | |
| | (SEQ ID NO: 1453) | |
| 1454 | GTCTTGCTGGGTTTCCAAAGGTTTTAGAGCTAGA | pegRNA*1, 5, 8, 11, contains linker |
| | AATAGCAAGTTAAAATAAGGCTAGTCCGTTATCA | sequence AACATTGA; hairpin SEQ ID |
| | ACTTGAAAAAGTGGCACCGAGTCGGTGCTCTGTA | NO: 3591; 3′ TTTT |
| | TGGGATCAGGCTTCCACTTTGGAAACCCAGCAAC | |
| | ATTGACGCGTCTCTACGTGGGGGCGCGTTTT | |
| | (SEQ ID NO: 1454) | |
| 1455 | GTCTTGCTGGGTTTCCAAAGGTTTTAGAGCTAGA | pegRNA*1, 5, 8, 11, contains linker |
| | AATAGCAAGTTAAAATAAGGCTAGTCCGTTATCA | sequence AACATTGA; hairpin SEQ ID |
| | ACTTGAAAAAGTGGCACCGAGTCGGTGCTTTCTG | NO: 3591; 3′ TTTT |
| | TATGGGATCAGGCTTCCACTTTGGAAACCCAAAC | |
| | ATTGACGCGTCTCTACGTGGGGGCGCGTTTT | |
| | (SEQ ID NO: 1455) | |
| 1456 | GTCTTGCTGGGTTTCCAAAGGTTTTAGAGCTAGA | pegRNA*1, 5, 8, 11, contains linker |
| | AATAGCAAGTTAAAATAAGGCTAGTCCGTTATCA | sequence AACATTGA; hairpin SEQ ID |
| | ACTTGAAAAAGTGGCACCGAGTCGGTGCGCTTTC | NO: 3591; 3′ TTTT |
| | TGTATGGGATCAGGCTTCCACTTTGGAAACCAAC | |
| | ATTGACGCGTCTCTACGTGGGGGCGCGTTTT | |
| | (SEQ ID NO: 1456) | |
| 1457 | GTCTTGCTGGGTTTCCAAAGGTTTTAGAGCTAGA | pegRNA*1, 5, 8, 11, contains linker |
| | AATAGCAAGTTAAAATAAGGCTAGTCCGTTATCA | sequence AACATTGA; hairpin SEQ ID |
| | ACTTGAAAAAGTGGCACCGAGTCGGTGCTCTGTA | NO: 3591; 3′ TTTT |
| | TGGGATCAGGCTTCCACTTTGGAAACCCAGCAAA | |
| | ACATTGACGCGTCTCTACGTGGGGGCGCGTTTT | |
| | (SEQ ID NO: 1457) | |
| 1458 | GTCTTGCTGGGTTTCCAAAGGTTTTAGAGCTAGA | pegRNA*1, 5, 8, 11, contains linker |
| | AATAGCAAGTTAAAATAAGGCTAGTCCGTTATCA | sequence AACATTGA; hairpin SEQ ID |
| | ACTTGAAAAAGTGGCACCGAGTCGGTGCTTTCTG | NO: 3591; 3′ TTTT |
| | TATGGGATCAGGCTTCCACTTTGGAAACCCAGCA | |
| | ACATTGACGCGTCTCTACGTGGGGGCGCGTTTT | |
| | (SEQ ID NO: 1458) | |
| 1459 | GTCTTGCTGGGTTTCCAAAGGTTTTAGAGCTAGA | pegRNA*1, 5, 8, 11, contains linker |
| | AATAGCAAGTTAAAATAAGGCTAGTCCGTTATCA | sequence AACATTGA; hairpin SEQ ID |
| | ACTTGAAAAAGTGGCACCGAGTCGGTGCGCTTTC | NO: 3591; 3′ TTTT |
| | TGTATGGGATCAGGCTTCCACTTTGGAAACCCAA | |
| | ACATTGACGCGTCTCTACGTGGGGGCGCGTTTT | |
| | (SEQ ID NO: 1459) | |
| 1460 | GTCTTGCTGGGTTTCCAAAGGTTTTAGAGCTAGA | pegRNA*1, 5, 8, 11, contains linker |
| | AATAGCAAGTTAAAATAAGGCTAGTCCGTTATCA | sequence AACATTGA; hairpin SEQ ID |
| | ACTTGAAAAAGTGGCACCGAGTCGGTGCTTTCTG | NO: 3591; 3′ TTTT |
| | TATGGGATCAGGCTTCCACTTTGGAAACCCAGCA | |
| | AAACATTGACGCGTCTCTACGTGGGGGCGCGTTT | |
| | T (SEQ ID NO: 1460) | |
| 1461 | GTCTTGCTGGGTTTCCAAAGGTTTTAGAGCTAGA | pegRNA*1, 5, 8, 11, contains linker |
| | AATAGCAAGTTAAAATAAGGCTAGTCCGTTATCA | sequence AACATTGA; hairpin SEQ ID |
| | ACTTGAAAAAGTGGCACCGAGTCGGTGCGCTTTC | NO: 3591; 3′ TTTT |
| | TGTATGGGATCAGGCTTCCACTTTGGAAACCCAG | |
| | CAACATTGACGCGTCTCTACGTGGGGGCGCGTTT | |
| | T (SEQ ID NO: 1461) | |
| 1462 | GTCTTGCTGGGTTTCCAAAGGTTTTAGAGCTAGA | pegRNA*1, 5, 8, 11, contains linker |
| | AATAGCAAGTTAAAATAAGGCTAGTCCGTTATCA | sequence AACATTGA; hairpin SEQ ID |
| | ACTTGAAAAAGTGGCACCGAGTCGGTGCGCTTTC | NO: 3591; 3′ TTTT |
| | TGTATGGGATCAGGCTTCCACTTTGGAAACCCAG | |
| | CAAAACATTGACGCGTCTCTACGTGGGGGCGCGT | |
| | TTT (SEQ ID NO: 1462) | |
| 49 | TTTCTTGTGATTATCAGTTTGTTTTAGAGCTAGAA | PE3 ngRNA (TG; TGG PAM) |
| | ATAGCAAGTTAAAATAAGGCTAGTCCGTTATCAA | |
| | CTTGAAAAAGTGGCACCGAGTCGGTGC (SEQ ID | |
| | NO: 49) | |
| 50 | GGATGCAGAAGCTTTCTGTAGTTTTAGAGCTAGA | PE3 ngRNA (TG; TGG PAM) |
| | AATAGCAAGTTAAAATAAGGCTAGTCCGTTATCA | |
| | ACTTGAAAAAGTGGCACCGAGTCGGTGC (SEQ ID | |
| | NO: 50) | |
| 51 | GAAGCTTTCTGTATGGGATCGTTTTAGAGCTAGA | PE3b*8 ngRNA (AG; AGG PAM) |
| | AATAGCAAGTTAAAATAAGGCTAGTCCGTTATCA | |
| | ACTTGAAAAAGTGGCACCGAGTCGGTGC (SEQ ID | |
| | NO: 51) | |
| 52 | ATGGGATCAGGCTTCCACTTGTTTTAGAGCTAGA | PE3b*5 ngRNA (TG; TGG PAM) |
| | AATAGCAAGTTAAAATAAGGCTAGTCCGTTATCA | |
| | ACTTGAAAAAGTGGCACCGAGTCGGTGC (SEQ ID | |
| | NO: 52) | |
| 53 | GGATGCAGAAGCTTTCTGTAGTTTTAGAGCTAGA | PE3 ngRNA (TG; TGG PAM), contains 3′ |
| | AATAGCAAGTTAAAATAAGGCTAGTCCGTTATCA | TTTT |
| | ACTTGAAAAAGTGGCACCGAGTCGGTGCTTTT | |
| | (SEQ ID NO: 53) | |
| 54 | GAAGCTTTCTGTATGGGATCGTTTTAGAGCTAGA | PE3b*8 ngRNA (AG; AGG PAM), contains 3′ |
| | AATAGCAAGTTAAAATAAGGCTAGTCCGTTATCA | TTTT |
| | ACTTGAAAAAGTGGCACCGAGTCGGTGCTTTT | |
| | (SEQ ID NO: 54) | |
| 55 | GTTTCTTGTGATTATCAGTTTGTTTTAGAGCTAGA | PE3 ngRNA (TG; TGG PAM), contains 3′ |
| | AATAGCAAGTTAAAATAAGGCTAGTCCGTTATCA | TTTT; 5′G |
| | ACTTGAAAAAGTGGCACCGAGTCGGTGCTTTT | |
| | (SEQ ID NO: 55) | |
| 56 | GATGGGATCAGGCTTCCACTTGTTTTAGAGCTAG | PE3b*5 ngRNA (TG; TGG PAM), contains 3′ |
| | AAATAGCAAGTTAAAATAAGGCTAGTCCGTTATC | TTTT; 5′G |
| | AACTTGAAAAAGTGGCACCGAGTCGGTGCTTTT | |
| | (SEQ ID NO: 56) | |
| 57 | GGATGCAGAAGCTTTCTGTAGTTTTAGAGCTAGA | PE3 ngRNA (TG; TGG PAM), contains linker |
| | AATAGCAAGTTAAAATAAGGCTAGTCCGTTATCA | sequence AACATTGA; hairpin SEQ ID |
| | ACTTGAAAAAGTGGCACCGAGTCGGTGCAACAT | NO: 3591; 3′ TTTT |
| | TGACGCGTCTCTACGTGGGGGCGCGTTTT (SEQ | |
| | ID NO: 57) | |
| 58 | GAAGCTTTCTGTATGGGATCGTTTTAGAGCTAGA | PE3b*8 ngRNA (AG; AGG PAM), contains |
| | AATAGCAAGTTAAAATAAGGCTAGTCCGTTATCA | linker sequence AACATTGA; hairpin SEQ ID |
| | ACTTGAAAAAGTGGCACCGAGTCGGTGCAACAT | NO: 3591; 3′ TTTT |
| | TGACGCGTCTCTACGTGGGGGCGCGTTTT (SEQ | |
| | ID NO: 58) | |
| 59 | GTTTCTTGTGATTATCAGTTTGTTTTAGAGCTAGA | PE3 ngRNA (TG; TGG PAM), contains linker |
| | AATAGCAAGTTAAAATAAGGCTAGTCCGTTATCA | sequence AACATTGA; hairpin SEQ ID |
| | ACTTGAAAAAGTGGCACCGAGTCGGTGCAACAT | NO: 3591; 3′ TTTT; 5′G |
| | TGACGCGTCTCTACGTGGGGGCGCGTTTT (SEQ | |
| | ID NO: 59) | |
| 60 | GATGGGATCAGGCTTCCACTTGTTTTAGAGCTAG | PE3b*5 ngRNA (TG; TGG PAM), contains |
| | AAATAGCAAGTTAAAATAAGGCTAGTCCGTTATC | linker sequence AACATTGA; hairpin SEQ ID |
| | AACTTGAAAAAGTGGCACCGAGTCGGTGCAACA | NO: 3591; 3′ TTTT; 5′G |
| | TTGACGCGTCTCTACGTGGGGGCGCGTTTT (SEQ | |
| | ID NO: 60) | |
| 3631 | GTCTTGCTGGGTTTCCAAAGGTTTTAGAGCTAGA | pegRNA*1, 5, 8, 11, contains linker |
| | AATAGCAAGTTAAAATAAGGCTAGTCCGTTATCA | sequence AACATTGA; hairpin SEQ ID |
| | ACTTGAAAAAGTGGCACCGAGTCGGTGCATGGG | NO: 3591 |
| | ATCAGGCTTCCACTTTGGAAACCAACATTGACGC | |
| | GTCTCTACGTGGGGGCGCG (SEQ ID NO: 3638) | |
| 3632 | GTCTTGCTGGGTTTCCAAAGGTTTTAGAGCTAGA | pegRNA*1, 5, 8, 11, contains linker |
| | AATAGCAAGTTAAAATAAGGCTAGTCCGTTATCA | sequence AACATTGA; hairpin SEQ ID |
| | ACTTGAAAAAGTGGCACCGAGTCGGTGCATGGG | NO: 3591 |
| | ATCAGGCTTCCACTTTGGAAACCCAAACATTGAC | |
| | GCGTCTCTACGTGGGGGCGCG (SEQ ID NO: 3639) | |
| 3633 | GTCTTGCTGGGTTTCCAAAGGTTTTAGAGCTAGA | pegRNA*1, 5, 8, 11, contains linker |
| | AATAGCAAGTTAAAATAAGGCTAGTCCGTTATCA | sequence AACATTGA; hairpin SEQ ID |
| | ACTTGAAAAAGTGGCACCGAGTCGGTGCGTATG | NO: 3591 |
| | GGATCAGGCTTCCACTTTGGAAACCAACATTGAC | |
| | GCGTCTCTACGTGGGGGCGCG (SEQ ID NO: 3640) | |
| 3634 | GTCTTGCTGGGTTTCCAAAGGTTTTAGAGCTAGA | pegRNA*1, 5, 8, 11, contains linker |
| | AATAGCAAGTTAAAATAAGGCTAGTCCGTTATCA | sequence AACATTGA; hairpin SEQ ID |
| | ACTTGAAAAAGTGGCACCGAGTCGGTGCATGGG | NO: 3591 |
| | ATCAGGCTTCCACTTTGGAAACCCAGCAACATTG | |
| | ACGCGTCTCTACGTGGGGGCGCG (SEQ ID | |
| | NO: 3641) | |
| 3635 | GTCTTGCTGGGTTTCCAAAGGTTTTAGAGCTAGA | pegRNA*1, 5, 8, 11, contains linker |
| | AATAGCAAGTTAAAATAAGGCTAGTCCGTTATCA | sequence AACATTGA; hairpin SEQ ID |
| | ACTTGAAAAAGTGGCACCGAGTCGGTGCGTATG | NO: 3591 |
| | GGATCAGGCTTCCACTTTGGAAACCCAAACATTG | |
| | ACGCGTCTCTACGTGGGGGCGCG (SEQ ID | |
| | NO: 3642) | |
| 3636 | GTCTTGCTGGGTTTCCAAAGGTTTTAGAGCTAGA | pegRNA*1, 5, 8, 11, contains linker |
| | AATAGCAAGTTAAAATAAGGCTAGTCCGTTATCA | sequence AACATTGA; hairpin SEQ ID |
| | ACTTGAAAAAGTGGCACCGAGTCGGTGCTCTGTA | NO: 3591 |
| | TGGGATCAGGCTTCCACTTTGGAAACCAACATTG | |
| | ACGCGTCTCTACGTGGGGGCGCG (SEQ ID | |
| | NO: 3643) | |
| 3637 | GTCTTGCTGGGTTTCCAAAGGTTTTAGAGCTAGA | pegRNA*1, 5, 8, 11, contains linker |
| | AATAGCAAGTTAAAATAAGGCTAGTCCGTTATCA | sequence AACATTGA; hairpin SEQ ID |
| | ACTTGAAAAAGTGGCACCGAGTCGGTGCATGGG | NO: 3591 |
| | ATCAGGCTTCCACTTTGGAAACCCAGCAAAACAT | |
| | TGACGCGTCTCTACGTGGGGGCGCG (SEQ ID | |
| | NO: 3644) | |
| 3638 | GTCTTGCTGGGTTTCCAAAGGTTTTAGAGCTAGA | pegRNA*1, 5, 8, 11, contains linker |
| | AATAGCAAGTTAAAATAAGGCTAGTCCGTTATCA | sequence AACATTGA; hairpin SEQ ID |
| | ACTTGAAAAAGTGGCACCGAGTCGGTGCGTATG | NO: 3591 |
| | GGATCAGGCTTCCACTTTGGAAACCCAGCAACAT | |
| | TGACGCGTCTCTACGTGGGGGCGCG (SEQ ID | |
| | NO: 3645) | |
| 3639 | GTCTTGCTGGGTTTCCAAAGGTTTTAGAGCTAGA | pegRNA*1, 5, 8, 11, contains linker |
| | AATAGCAAGTTAAAATAAGGCTAGTCCGTTATCA | sequence AACATTGA; hairpin SEQ ID |
| | ACTTGAAAAAGTGGCACCGAGTCGGTGCTCTGTA | NO: 3591 |
| | TGGGATCAGGCTTCCACTTTGGAAACCCAAACAT | |
| | TGACGCGTCTCTACGTGGGGGCGCG (SEQ ID | |
| | NO: 3646) | |
| 3640 | GTCTTGCTGGGTTTCCAAAGGTTTTAGAGCTAGA | pegRNA*1, 5, 8, 11, contains linker |
| | AATAGCAAGTTAAAATAAGGCTAGTCCGTTATCA | sequence AACATTGA; hairpin SEQ ID |
| | ACTTGAAAAAGTGGCACCGAGTCGGTGCTTTCTG | NO: 3591 |
| | TATGGGATCAGGCTTCCACTTTGGAAACCAACAT | |
| | TGACGCGTCTCTACGTGGGGGCGCG (SEQ ID | |
| | NO: 3647) | |
| 3641 | GTCTTGCTGGGTTTCCAAAGGTTTTAGAGCTAGA | pegRNA*1, 5, 8, 11, contains linker |
| | AATAGCAAGTTAAAATAAGGCTAGTCCGTTATCA | sequence AACATTGA; hairpin SEQ ID |
| | ACTTGAAAAAGTGGCACCGAGTCGGTGCGTATG | NO: 3591 |
| | GGATCAGGCTTCCACTTTGGAAACCCAGCAAAA | |
| | CATTGACGCGTCTCTACGTGGGGGCGCG (SEQ ID | |
| | NO: 3648) | |
| 3642 | GTCTTGCTGGGTTTCCAAAGGTTTTAGAGCTAGA | pegRNA*1, 5, 8, 11, contains linker |
| | AATAGCAAGTTAAAATAAGGCTAGTCCGTTATCA | sequence AACATTGA; hairpin SEQ ID |
| | ACTTGAAAAAGTGGCACCGAGTCGGTGCTCTGTA | NO: 3591 |
| | TGGGATCAGGCTTCCACTTTGGAAACCCAGCAAC | |
| | ATTGACGCGTCTCTACGTGGGGGCGCG (SEQ ID | |
| | NO: 3649) | |
| 3643 | GTCTTGCTGGGTTTCCAAAGGTTTTAGAGCTAGA | pegRNA*1, 5, 8, 11, contains linker |
| | AATAGCAAGTTAAAATAAGGCTAGTCCGTTATCA | sequence AACATTGA; hairpin SEQ ID |
| | ACTTGAAAAAGTGGCACCGAGTCGGTGCTTTCTG | NO: 3591 |
| | TATGGGATCAGGCTTCCACTTTGGAAACCCAAAC | |
| | ATTGACGCGTCTCTACGTGGGGGCGCG (SEQ ID | |
| | NO: 3650) | |
| 3644 | GTCTTGCTGGGTTTCCAAAGGTTTTAGAGCTAGA | pegRNA*1, 5, 8, 11, contains linker |
| | AATAGCAAGTTAAAATAAGGCTAGTCCGTTATCA | sequence AACATTGA; hairpin SEQ ID |
| | ACTTGAAAAAGTGGCACCGAGTCGGTGCGCTTTC | NO: 3591 |
| | TGTATGGGATCAGGCTTCCACTTTGGAAACCAAC | |
| | ATTGACGCGTCTCTACGTGGGGGCGCG (SEQ ID | |
| | NO: 3651) | |
| 3645 | GTCTTGCTGGGTTTCCAAAGGTTTTAGAGCTAGA | pegRNA*1, 5, 8, 11, contains linker |
| | AATAGCAAGTTAAAATAAGGCTAGTCCGTTATCA | sequence AACATTGA; hairpin SEQ ID |
| | ACTTGAAAAAGTGGCACCGAGTCGGTGCTCTGTA | NO: 3591 |
| | TGGGATCAGGCTTCCACTTTGGAAACCCAGCAAA | |
| | ACATTGACGCGTCTCTACGTGGGGGCGCG (SEQ | |
| | ID NO: 3652) | |
| 3646 | GTCTTGCTGGGTTTCCAAAGGTTTTAGAGCTAGA | pegRNA*1, 5, 8, 11, contains linker |
| | AATAGCAAGTTAAAATAAGGCTAGTCCGTTATCA | sequence AACATTGA; hairpin SEQ ID |
| | ACTTGAAAAAGTGGCACCGAGTCGGTGCTTTCTG | NO: 3591 |
| | TATGGGATCAGGCTTCCACTTTGGAAACCCAGCA | |
| | ACATTGACGCGTCTCTACGTGGGGGCGCG (SEQ | |
| | ID NO: 3653) | |
| 3647 | GTCTTGCTGGGTTTCCAAAGGTTTTAGAGCTAGA | pegRNA*1, 5, 8, 11, contains linker |
| | AATAGCAAGTTAAAATAAGGCTAGTCCGTTATCA | sequence AACATTGA; hairpin SEQ ID |
| | ACTTGAAAAAGTGGCACCGAGTCGGTGCGCTTTC | NO: 3591 |
| | TGTATGGGATCAGGCTTCCACTTTGGAAACCCAA | |
| | ACATTGACGCGTCTCTACGTGGGGGCGCG (SEQ | |
| | ID NO: 3654) | |
| 3648 | GTCTTGCTGGGTTTCCAAAGGTTTTAGAGCTAGA | pegRNA*1, 5, 8, 11, contains linker |
| | AATAGCAAGTTAAAATAAGGCTAGTCCGTTATCA | sequence AACATTGA; hairpin SEQ ID |
| | ACTTGAAAAAGTGGCACCGAGTCGGTGCTTTCTG | NO: 3591 |
| | TATGGGATCAGGCTTCCACTTTGGAAACCCAGCA | |
| | AAACATTGACGCGTCTCTACGTGGGGGCGCG | |
| | (SEQ ID NO: 3655) | |
| 3649 | GTCTTGCTGGGTTTCCAAAGGTTTTAGAGCTAGA | pegRNA*1, 5, 8, 11, contains linker |
| | AATAGCAAGTTAAAATAAGGCTAGTCCGTTATCA | sequence AACATTGA; hairpin SEQ ID |
| | ACTTGAAAAAGTGGCACCGAGTCGGTGCGCTTTC | NO: 3591 |
| | TGTATGGGATCAGGCTTCCACTTTGGAAACCCAG | |
| | CAACATTGACGCGTCTCTACGTGGGGGCGCG | |
| | (SEQ ID NO: 3656) | |
| 3650 | GTCTTGCTGGGTTTCCAAAGGTTTTAGAGCTAGA | pegRNA*1, 5, 8, 11, contains linker |
| | AATAGCAAGTTAAAATAAGGCTAGTCCGTTATCA | sequence AACATTGA; hairpin SEQ ID |
| | ACTTGAAAAAGTGGCACCGAGTCGGTGCGCTTTC | NO: 3591 |
| | TGTATGGGATCAGGCTTCCACTTTGGAAACCCAG | |
| | CAAAACATTGACGCGTCTCTACGTGGGGGCGCG | |
| | (SEQ ID NO: 3657) | |

TABLE 19

| Sequence | | |
|---|---|---|
| Number | Sequence | Description |
| 1463 | AAGACAGGTGTCTTGCT (SEQ ID NO: 1463) | PEgRNA spacer (GG; GGG PAM) |
| 1464 | GAAGACAGGTGTCTTGCT (SEQ ID NO: 1464) | PEgRNA spacer (GG; GGG PAM) |
| 1465 | TGAAGACAGGTGTCTTGCT (SEQ ID NO: 1465) | PEgRNA spacer (GG; GGG PAM) |
| 213 | GTGAAGACAGGTGTCTTGCT (SEQ ID NO: 213) | PEgRNA spacer (GG; GGG PAM) |
| 1466 | CGTGAAGACAGGTGTCTTGCT | PEgRNA spacer (GG; GGG PAM) |
| | (SEQ ID NO: 1466) | |
| 1467 | ACGTGAAGACAGGTGTCTTGCT | PEgRNA spacer (GG; GGG PAM) |
| | (SEQ ID NO: 1467) | |
| 1468 | AAGAC | PBS |
| 1469 | AAGACA | PBS |
| 1470 | AAGACAC | PBS |
| 1471 | AAGACACC | PBS |
| 1472 | AAGACACCT | PBS |
| 1473 | AAGACACCTG (SEQ ID NO: 1473) | PBS |
| 1474 | AAGACACCTGT (SEQ ID NO: 1474) | PBS |
| 1475 | AAGACACCTGTC (SEQ ID NO: 1475) | PBS |
| 1476 | AAGACACCTGTCT (SEQ ID NO: 1476) | PBS |
| 1477 | AAGACACCTGTCTT (SEQ ID NO: 1477) | PBS |
| 1478 | AAGACACCTGTCTTC (SEQ ID NO: 1478) | PBS |
| 1479 | AAGACACCTGTCTTCA (SEQ ID NO: 1479) | PBS |
| 1480 | AAGACACCTGTCTTCAC (SEQ ID NO: 1480) | PBS |
| 1481 | AAGACACCTGTCTTCACG (SEQ ID NO: 1481) | PBS |
| 1482 | AAGACACCTGTCTTCACGT (SEQ ID NO: 1482) | PBS |
| 1483 | GATCAGGCTTCCACTTTGGAAACACAGC (SEQ ID | RTT*1, 2, 3, 4, 7, 10 (GG-to-GT; GGG-to- |
| | NO: 1483) | GTG PAM silencing edit) |
| 1484 | GATCAGGCTTCCACTTTGGAAACCCAGC (SEQ ID | RTT*1, 2, 3, 10 |
| | NO: 1484) | |
| 1485 | GATCAGGCTTCCACTTTGGAAACGCAGC (SEQ ID | RTT*1, 2, 3, 5, 8, 10 (GG-to-GC; GGG-to- |
| | NO: 1485) | GCG PAM silencing edit) |
| 1486 | GATCAGGCTTCCACTTTGGAAACTCAGC (SEQ ID | RTT*1, 2, 3, 6, 9, 10 (GG-to-GA; GGG-to- |
| | NO: 1486) | GAG PAM silencing edit) |
| 1487 | GGATCAGGCTTCCACTTTGGAAACACAGC (SEQ | RTT*1, 2, 3, 4, 7, 10 (GG-to-GT; GGG-to- |
| | ID NO: 1487) | GTG PAM silencing edit) |
| 1488 | GGATCAGGCTTCCACTTTGGAAACCCAGC (SEQ | RTT*1, 2, 3, 10 |
| | ID NO: 1488) | |
| 1489 | GGATCAGGCTTCCACTTTGGAAACGCAGC (SEQ | RTT*1, 2, 3, 5, 8, 10 (GG-to-GC; GGG-to- |
| | ID NO: 1489) | GCG PAM silencing edit) |
| 1490 | GGATCAGGCTTCCACTTTGGAAACTCAGC (SEQ | RTT*1, 2, 3, 6, 9, 10 (GG-to-GA; GGG-to- |
| | ID NO: 1490) | GAG PAM silencing edit) |
| 1491 | GGGATCAGGCTTCCACTTTGGAAACACAGC (SEQ | RTT*1, 2, 3, 4, 7, 10 (GG-to-GT; GGG-to- |
| | ID NO: 1491) | GTG PAM silencing edit) |
| 1492 | GGGATCAGGCTTCCACTTTGGAAACCCAGC (SEQ | RTT*1, 2, 3, 10 |
| | ID NO: 1492) | |
| 1493 | GGGATCAGGCTTCCACTTTGGAAACGCAGC (SEQ | RTT*1, 2, 3, 5, 8, 10 (GG-to-GC;GGG-to- |
| | ID NO: 1493) | GCG PAM silencing edit) |
| 1494 | GGGATCAGGCTTCCACTTTGGAAACTCAGC (SEQ | RTT*1, 2, 3, 6, 9, 10 (GG-to-GA;GGG-to- |
| | ID NO: 1494) | GAG PAM silencing edit) |
| 1495 | TGGGATCAGGCTTCCACTTTGGAAACACAGC | RTT*1, 2, 3, 4, 7, 10 (GG-to-GT;GGG-to- |
| | (SEQ ID NO: 1495) | GTG PAM silencing edit) |
| 1496 | TGGGATCAGGCTTCCACTTTGGAAACCCAGC | RTT*1, 2, 3, 10 |
| | (SEQ ID NO: 1496) | |
| 1497 | TGGGATCAGGCTTCCACTTTGGAAACGCAGC | RTT*1, 2, 3, 5, 8, 10 (GG-to-GC;GGG-to- |
| | (SEQ ID NO: 1497) | GCG PAM silencing edit) |
| 1498 | TGGGATCAGGCTTCCACTTTGGAAACTCAGC | RTT*1, 2, 3, 6, 9, 10 (GG-to-GA;GGG-to- |
| | (SEQ ID NO: 1498) | GAG PAM silencing edit) |
| 1499 | ATGGGATCAGGCTTCCACTTTGGAAACACAGC | RTT*1, 2, 3, 4, 7, 10 (GG-to-GT;GGG-to- |
| | (SEQ ID NO: 1499) | GTG PAM silencing edit) |
| 1500 | ATGGGATCAGGCTTCCACTTTGGAAACCCAGC | RTT*1, 2, 3, 10 |
| | (SEQ ID NO: 1500) | |
| 1501 | ATGGGATCAGGCTTCCACTTTGGAAACGCAGC | RTT*1, 2, 3, 5, 8, 10 (GG-to-GC;GGG-to- |
| | (SEQ ID NO: 1501) | GCG PAM silencing edit) |
| 1502 | ATGGGATCAGGCTTCCACTTTGGAAACTCAGC | RTT*1, 2, 3, 6, 9, 10 (GG-to-GA;GGG-to- |
| | (SEQ ID NO: 1502) | GAG PAM silencing edit) |
| 1503 | TATGGGATCAGGCTTCCACTTTGGAAACACAGC | RTT*1, 2, 3, 4, 7, 10 (GG-to-GT;GGG-to-GTG |
| | (SEQ ID NO: 1503) | PAM silencing edit) |
| 1504 | TATGGGATCAGGCTTCCACTTTGGAAACCCAGC | RTT*1, 2, 3, 10 |
| | (SEQ ID NO: 1504) | |
| 1505 | TATGGGATCAGGCTTCCACTTTGGAAACGCAGC | RTT*1, 2, 3, 5, 8, 10 (GG-to-GC;GGG-to-GCG |
| | (SEQ ID NO: 1505) | PAM silencing edit) |
| 1506 | TATGGGATCAGGCTTCCACTTTGGAAACTCAGC | RTT*1, 2, 3, 6, 9, 10 (GG-to-GA;GGG-to-GAG |
| | (SEQ ID NO: 1506) | PAM silencing edit) |
| 1507 | GTATGGGATCAGGCTTCCACTTTGGAAACACAGC | RTT*1, 2, 3, 4, 7, 10 (GG-to-GT;GGG-to-GTG |
| | (SEQ ID NO: 1507) | PAM silencing edit) |
| 1508 | GTATGGGATCAGGCTTCCACTTTGGAAACCCAGC | RTT*1, 2, 3, 10 |
| | (SEQ ID NO: 1508) | |
| 1509 | GTATGGGATCAGGCTTCCACTTTGGAAACGCAGC | RTT*1, 2, 3, 5, 8, 10 (GG-to-GC;GGG-to-GCG |
| | (SEQ ID NO: 1509) | PAM silencing edit) |
| 1510 | GTATGGGATCAGGCTTCCACTTTGGAAACTCAGC | RTT*1, 2, 3, 6, 9, 10 (GG-to-GA;GGG-to-GAG |
| | (SEQ ID NO: 1510) | PAM silencing edit) |
| 1511 | TGTATGGGATCAGGCTTCCACTTTGGAAACACAG | RTT*1, 2, 3, 4, 7, 10 (GG-to-GT;GGG-to-GTG |
| | C (SEQ ID NO: 1511) | PAM silencing edit) |
| 1512 | TGTATGGGATCAGGCTTCCACTTTGGAAACCCAG | RTT*1, 2, 3, 10 |
| | C (SEQ ID NO: 1512) | |
| 1513 | TGTATGGGATCAGGCTTCCACTTTGGAAACGCAG | RTT*1, 2, 3, 5, 8, 10 (GG-to-GC;GGG-to-GCG |
| | C (SEQ ID NO: 1513) | PAM silencing edit) |
| 1514 | TGTATGGGATCAGGCTTCCACTTTGGAAACTCAG | RTT*1, 2, 3, 6, 9, 10 (GG-to-GA;GGG-to-GAG |
| | C (SEQ ID NO: 1514) | PAM silencing edit) |
| 1515 | CTGTATGGGATCAGGCTTCCACTTTGGAAACACA | RTT*1, 2, 3, 4, 7, 10 (GG-to-GT;GGG-to-GTG |
| | GC (SEQ ID NO: 1515) | PAM silencing edit) |
| 1516 | CTGTATGGGATCAGGCTTCCACTTTGGAAACCCA | RTT*1, 2, 3, 10 |
| | GC (SEQ ID NO: 1516) | |
| 1517 | CTGTATGGGATCAGGCTTCCACTTTGGAAACGCA | RTT*1, 2, 3, 5, 8, 10 (GG-to-GC;GGG-to-GCG |
| | GC (SEQ ID NO: 1517) | PAM silencing edit) |
| 1518 | CTGTATGGGATCAGGCTTCCACTTTGGAAACTCA | RTT*1, 2, 3, 6, 9, 10 (GG-to-GA;GGG-to-GAG |
| | GC (SEQ ID NO: 1518) | PAM silencing edit) |
| 1519 | TCTGTATGGGATCAGGCTTCCACTTTGGAAACAC | RTT*1, 2, 3, 4, 7, 10 (GG-to-GT;GGG-to-GTG |
| | AGC (SEQ ID NO: 1519) | PAM silencing edit) |
| 1520 | TCTGTATGGGATCAGGCTTCCACTTTGGAAACCC | RTT*1, 2, 3, 10 |
| | AGC (SEQ ID NO: 1520) | |
| 1521 | TCTGTATGGGATCAGGCTTCCACTTTGGAAACGC | RTT*1, 2, 3, 5, 8, 10 (GG-to-GC;GGG-to-GCG |
| | AGC (SEQ ID NO: 1521) | PAM silencing edit) |
| 1522 | TCTGTATGGGATCAGGCTTCCACTTTGGAAACTC | RTT*1, 2, 3, 6, 9, 10 (GG-to-GA;GGG-to-GAG |
| | AGC (SEQ ID NO: 1522) | PAM silencing edit) |
| 1523 | TTCTGTATGGGATCAGGCTTCCACTTTGGAAACA | RTT*1, 2, 3, 4, 7, 10 (GG-to-GT;GGG-to-GTG |
| | CAGC (SEQ ID NO: 1523) | PAM silencing edit) |
| 1524 | TTCTGTATGGGATCAGGCTTCCACTTTGGAAACC | RTT*1, 2, 3, 10 |
| | CAGC (SEQ ID NO: 1524) | |
| 1525 | TTCTGTATGGGATCAGGCTTCCACTTTGGAAACG | RTT*1, 2, 3, 5, 8, 10 (GG-to-GC;GGG-to-GCG |
| | CAGC (SEQ ID NO: 1525) | PAM silencing edit) |
| 1526 | TTCTGTATGGGATCAGGCTTCCACTTTGGAAACT | RTT*1, 2, 3, 6, 9, 10 (GG-to-GA;GGG-to-GAG |
| | CAGC (SEQ ID NO: 1526) | PAM silencing edit) |
| 1527 | TTTCTGTATGGGATCAGGCTTCCACTTTGGAAAC | RTT*1, 2, 3, 4, 7, 10 (GG-to-GT;GGG-to-GTG |
| | ACAGC (SEQ ID NO: 1527) | PAM silencing edit) |
| 1528 | TTTCTGTATGGGATCAGGCTTCCACTTTGGAAAC | RTT*1, 2, 3, 10 |
| | CCAGC (SEQ ID NO: 1528) | |
| 1529 | TTTCTGTATGGGATCAGGCTTCCACTTTGGAAAC | RTT*1, 2, 3, 5, 8, 10 (GG-to-GC;GGG-to-GCG |
| | GCAGC (SEQ ID NO: 1529) | PAM silencing edit) |
| 1530 | TTTCTGTATGGGATCAGGCTTCCACTTTGGAAAC | RTT*1, 2, 3, 6, 9, 10 (GG-to-GA;GGG-to-GAG |
| | TCAGC (SEQ ID NO: 1530) | PAM silencing edit) |
| 1531 | CTTTCTGTATGGGATCAGGCTTCCACTTTGGAAA | RTT*1, 2, 3, 4, 7, 10 (GG-to-GT;GGG-to-GTG |
| | CACAGC (SEQ ID NO: 1531) | PAM silencing edit) |
| 1532 | CTTTCTGTATGGGATCAGGCTTCCACTTTGGAAA | RTT*1, 2, 3, 10 |
| | CCCAGC (SEQ ID NO: 1532) | |
| 1533 | CTTTCTGTATGGGATCAGGCTTCCACTTTGGAAA | RTT*1, 2, 3, 5, 8, 10 (GG-to-GC;GGG-to-GCG |
| | CGCAGC (SEQ ID NO: 1533) | PAM silencing edit) |
| 1534 | CTTTCTGTATGGGATCAGGCTTCCACTTTGGAAA | RTT*1, 2, 3, 6, 9, 10 (GG-to-GA;GGG-to-GAG |
| | CTCAGC (SEQ ID NO: 1534) | PAM silencing edit) |
| 24 | AAGATGGCTCAAGATTCAGT (SEQ ID NO: 24) | PE3 ngRNA spacer (AG PAM) |
| 25 | AAGATTCAGTAGATCTTTCT (SEQ ID NO: 25) | PE3 ngRNA spacer (TG PAM) |
| 26 | AAGCTTTCTGTATGGGATCA (SEQ ID NO: 26) | PE3b*1 ngRNA spacer (GG PAM) |
| 27 | AGATCTTTCTTGTGATTATC (SEQ ID NO: 27) | PE3 ngRNA spacer (AG PAM) |
| 28 | ATGGGATCAGGCTTCCACTT (SEQ ID NO: 28) | PE3b*2 ngRNA spacer (TG;TGG PAM) |
| 29 | CCTTTTCGCTTTTTCCAAGA (SEQ ID NO: 29) | PE3 ngRNA spacer (TG;TGG PAM) |
| 30 | CTTTTCGCTTTTTCCAAGAT (SEQ ID NO: 30) | PE3 ngRNA spacer (GG PAM) |
| 31 | GAAGCTTTCTGTATGGGATC (SEQ ID NO: 31) | PE3b*3 ngRNA spacer (AG;AGG PAM) |
| 32 | GATGCAGAAGCTTTCTGTAT (SEQ ID NO: 32) | PE3 ngRNA spacer (GG PAM) |
| 33 | GATTCAGTAGATCTTTCTTG (SEQ ID NO: 33) | PE3 ngRNA spacer (TG PAM) |
| 34 | GCTTTTTCCAAGATGGCTCA (SEQ ID NO: 34) | PE3 ngRNA spacer (AG PAM) |
| 35 | GGATGCAGAAGCTTTCTGTA (SEQ ID NO: 35) | PE3 ngRNA spacer (TG;TGG PAM) |
| 1535 | GGCTTCCACTTTGGAAACAC (SEQ ID NO: 1535) | PE3b*4 ngRNA spacer (AG PAM) |
| 36 | GGCTTCCACTTTGGAAACCC (SEQ ID NO: 36) | PE3 ngRNA spacer (AG PAM) |
| 1536 | GGCTTCCACTTTGGAAACGC (SEQ ID NO: 1536) | PE3b*5 ngRNA spacer (AG PAM) |
| 1537 | GGCTTCCACTTTGGAAACTC (SEQ ID NO: 1537) | PE3b*6 ngRNA spacer (AG PAM) |
| 37 | GTGAAGGGACATCACCTTTT (SEQ ID NO: 37) | PE3 ngRNA spacer (CG PAM) |
| 38 | TCACCTTTTCGCTTTTTCCA (SEQ ID NO: 38) | PE3 ngRNA spacer (AG PAM) |
| 39 | TCCAAGATGGCTCAAGATTC (SEQ ID NO: 39) | PE3 ngRNA spacer (AG PAM) |
| 1538 | TCCACTTTGGAAACACAGCA (SEQ ID NO: 1538) | PE3b*7 ngRNA spacer (AG PAM) |
| 40 | TCCACTTTGGAAACCCAGCA (SEQ ID NO: 40) | PE3 ngRNA spacer (AG PAM) |
| 1539 | TCCACTTTGGAAACGCAGCA (SEQ ID NO: 1539) | PE3b*8 ngRNA spacer (AG PAM) |
| 1540 | TCCACTTTGGAAACTCAGCA (SEQ ID NO: 1540) | PE3b*9 ngRNA spacer (AG PAM) |
| 41 | TGATTATCAGTTTTGGATGC (SEQ ID NO: 41) | PE3 ngRNA spacer (AG PAM) |
| 43 | TGGGATCAGGCTTCCACTTT (SEQ ID NO: 43) | PE3b*10 ngRNA spacer (GG PAM) |
| 44 | TTATCAGTTTTGGATGCAGA (SEQ ID NO: 44) | PE3 ngRNA spacer (AG PAM) |
| 45 | TTCTTGTGATTATCAGTTTT (SEQ ID NO: 45) | PE3 ngRNA spacer (GG PAM) |
| 46 | TTGTGATTATCAGTTTTGGA (SEQ ID NO: 46) | PE3 ngRNA spacer (TG PAM) |
| 47 | TTTCTTGTGATTATCAGTTT (SEQ ID NO: 47) | PE3 ngRNA spacer (TG;TGG PAM) |
| 48 | TTTTGGATGCAGAAGCTTTC (SEQ ID NO: 48) | PE3 ngRNA spacer (TG PAM) |
| 1541 | GTGAAGACAGGTGTCTTGCTGTTTTAGAGCTAGA | pegRNA*1, 2, 3, 10 |
| | AATAGCAAGTTAAAATAAGGCTAGTCCGTTATCA | |
| | ACTTGAAAAAGTGGCACCGAGTCGGTGCATGGG | |
| | ATCAGGCTTCCACTTTGGAAACCCAGCAAGACA | |
| | CC (SEQ ID NO: 1541) | |
| 1542 | GTGAAGACAGGTGTCTTGCTGTTTTAGAGCTAGA | pegRNA*1, 2, 3, 10 |
| | AATAGCAAGTTAAAATAAGGCTAGTCCGTTATCA | |
| | ACTTGAAAAAGTGGCACCGAGTCGGTGCATGGG | |
| | ATCAGGCTTCCACTTTGGAAACCCAGCAAGACA | |
| | CCTG (SEQ ID NO: 1542) | |
| 1543 | GTGAAGACAGGTGTCTTGCTGTTTTAGAGCTAGA | pegRNA*1, 2, 3, 10 |
| | AATAGCAAGTTAAAATAAGGCTAGTCCGTTATCA | |
| | ACTTGAAAAAGTGGCACCGAGTCGGTGCGTATG | |
| | GGATCAGGCTTCCACTTTGGAAACCCAGCAAGA | |
| | CACC (SEQ ID NO: 1543) | |
| 1544 | GTGAAGACAGGTGTCTTGCTGTTTTAGAGCTAGA | pegRNA*1, 2, 3, 10 |
| | AATAGCAAGTTAAAATAAGGCTAGTCCGTTATCA | |
| | ACTTGAAAAAGTGGCACCGAGTCGGTGCATGGG | |
| | ATCAGGCTTCCACTTTGGAAACCCAGCAAGACA | |
| | CCTGTC (SEQ ID NO: 1544) | |
| 1545 | GTGAAGACAGGTGTCTTGCTGTTTTAGAGCTAGA | pegRNA*1, 2, 3, 10 |
| | AATAGCAAGTTAAAATAAGGCTAGTCCGTTATCA | |
| | ACTTGAAAAAGTGGCACCGAGTCGGTGCGTATG | |
| | GGATCAGGCTTCCACTTTGGAAACCCAGCAAGA | |
| | CACCTG (SEQ ID NO: 1545) | |
| 1546 | GTGAAGACAGGTGTCTTGCTGTTTTAGAGCTAGA | pegRNA*1, 2, 3, 10, contains 3′ TTTT |
| | AATAGCAAGTTAAAATAAGGCTAGTCCGTTATCA | |
| | ACTTGAAAAAGTGGCACCGAGTCGGTGCATGGG | |
| | ATCAGGCTTCCACTTTGGAAACCCAGCAAGACA | |
| | CCTTTT (SEQ ID NO: 1546) | |
| 1547 | GTGAAGACAGGTGTCTTGCTGTTTTAGAGCTAGA | pegRNA*1, 2, 3, 10 |
| | AATAGCAAGTTAAAATAAGGCTAGTCCGTTATCA | |
| | ACTTGAAAAAGTGGCACCGAGTCGGTGCTCTGTA | |
| | TGGGATCAGGCTTCCACTTTGGAAACCCAGCAA | |
| | GACACC (SEQ ID NO: 1547) | |
| 1548 | GTGAAGACAGGTGTCTTGCTGTTTTAGAGCTAGA | pegRNA*1, 2, 3, 10 |
| | AATAGCAAGTTAAAATAAGGCTAGTCCGTTATCA | |
| | ACTTGAAAAAGTGGCACCGAGTCGGTGCATGGG | |
| | ATCAGGCTTCCACTTTGGAAACCCAGCAAGACA | |
| | CCTGTCTT (SEQ ID NO: 1548) | |
| 1549 | GTGAAGACAGGTGTCTTGCTGTTTTAGAGCTAGA | pegRNA*1, 2, 3, 10 |
| | AATAGCAAGTTAAAATAAGGCTAGTCCGTTATCA | |
| | ACTTGAAAAAGTGGCACCGAGTCGGTGCGTATG | |
| | GGATCAGGCTTCCACTTTGGAAACCCAGCAAGA | |
| | CACCTGTC (SEQ ID NO: 1549) | |
| 1550 | GTGAAGACAGGTGTCTTGCTGTTTTAGAGCTAGA | pegRNA*1, 2, 3, 10, contains 3′ TTTT |
| | AATAGCAAGTTAAAATAAGGCTAGTCCGTTATCA | |
| | ACTTGAAAAAGTGGCACCGAGTCGGTGCATGGG | |
| | ATCAGGCTTCCACTTTGGAAACCCAGCAAGACA | |
| | CCTGTTTT (SEQ ID NO: 1550) | |
| 1551 | GTGAAGACAGGTGTCTTGCTGTTTTAGAGCTAGA | pegRNA*1, 2, 3, 10, contains 3′ TTTT |
| | AATAGCAAGTTAAAATAAGGCTAGTCCGTTATCA | |
| | ACTTGAAAAAGTGGCACCGAGTCGGTGCGTATG | |
| | GGATCAGGCTTCCACTTTGGAAACCCAGCAAGA | |
| | CACCTTTT (SEQ ID NO: 1551) | |
| 1552 | GTGAAGACAGGTGTCTTGCTGTTTTAGAGCTAGA | pegRNA*1, 2, 3, 10 |
| | AATAGCAAGTTAAAATAAGGCTAGTCCGTTATCA | |
| | ACTTGAAAAAGTGGCACCGAGTCGGTGCGTATG | |
| | GGATCAGGCTTCCACTTTGGAAACCCAGCAAGA | |
| | CACCTGTCT (SEQ ID NO: 1552) | |
| 1553 | GTGAAGACAGGTGTCTTGCTGTTTTAGAGCTAGA | pegRNA*1, 2, 3, 10 |
| | AATAGCAAGTTAAAATAAGGCTAGTCCGTTATCA | |
| | ACTTGAAAAAGTGGCACCGAGTCGGTGCTCTGTA | |
| | TGGGATCAGGCTTCCACTTTGGAAACCCAGCAA | |
| | GACACCTG (SEQ ID NO: 1553) | |
| 1554 | GTGAAGACAGGTGTCTTGCTGTTTTAGAGCTAGA | pegRNA*1, 2, 3, 10 |
| | AATAGCAAGTTAAAATAAGGCTAGTCCGTTATCA | |
| | ACTTGAAAAAGTGGCACCGAGTCGGTGCTTTCTG | |
| | TATGGGATCAGGCTTCCACTTTGGAAACCCAGCA | |
| | AGACACC (SEQ ID NO: 1554) | |
| 1555 | GTGAAGACAGGTGTCTTGCTGTTTTAGAGCTAGA | pegRNA*1, 2, 3, 10, contains 3′ TTTT |
| | AATAGCAAGTTAAAATAAGGCTAGTCCGTTATCA | |
| | ACTTGAAAAAGTGGCACCGAGTCGGTGCATGGG | |
| | ATCAGGCTTCCACTTTGGAAACCCAGCAAGACA | |
| | CCTGTCTTTT (SEQ ID NO: 1555) | |
| 1556 | GTGAAGACAGGTGTCTTGCTGTTTTAGAGCTAGA | pegRNA*1, 2, 3, 10, contains 3′ TTTT |
| | AATAGCAAGTTAAAATAAGGCTAGTCCGTTATCA | |
| | ACTTGAAAAAGTGGCACCGAGTCGGTGCGTATG | |
| | GGATCAGGCTTCCACTTTGGAAACCCAGCAAGA | |
| | CACCTGTTTT (SEQ ID NO: 1556) | |
| 1557 | GTGAAGACAGGTGTCTTGCTGTTTTAGAGCTAGA | pegRNA*1, 2, 3, 10 |
| | AATAGCAAGTTAAAATAAGGCTAGTCCGTTATCA | |
| | ACTTGAAAAAGTGGCACCGAGTCGGTGCTCTGTA | |
| | TGGGATCAGGCTTCCACTTTGGAAACCCAGCAA | |
| | GACACCTGTC (SEQ ID NO: 1557) | |
| 1558 | GTGAAGACAGGTGTCTTGCTGTTTTAGAGCTAGA | pegRNA*1, 2, 3, 10 |
| | AATAGCAAGTTAAAATAAGGCTAGTCCGTTATCA | |
| | ACTTGAAAAAGTGGCACCGAGTCGGTGCTTTCTG | |
| | TATGGGATCAGGCTTCCACTTTGGAAACCCAGCA | |
| | AGACACCTG (SEQ ID NO: 1558) | |
| 1559 | GTGAAGACAGGTGTCTTGCTGTTTTAGAGCTAGA | pegRNA*1, 2, 3, 10, contains 3′ TTTT |
| | AATAGCAAGTTAAAATAAGGCTAGTCCGTTATCA | |
| | ACTTGAAAAAGTGGCACCGAGTCGGTGCTCTGTA | |
| | TGGGATCAGGCTTCCACTTTGGAAACCCAGCAA | |
| | GACACCTTTT (SEQ ID NO: 1559) | |
| 1560 | GTGAAGACAGGTGTCTTGCTGTTTTAGAGCTAGA | pegRNA*1, 2, 3, 10, contains 3′ TTTT |
| | AATAGCAAGTTAAAATAAGGCTAGTCCGTTATCA | |
| | ACTTGAAAAAGTGGCACCGAGTCGGTGCATGGG | |
| | ATCAGGCTTCCACTTTGGAAACCCAGCAAGACA | |
| | CCTGTCTTTTTT (SEQ ID NO: 1560) | |
| 1561 | GTGAAGACAGGTGTCTTGCTGTTTTAGAGCTAGA | pegRNA*1, 2, 3, 10, contains 3′ TTTT |
| | AATAGCAAGTTAAAATAAGGCTAGTCCGTTATCA | |
| | ACTTGAAAAAGTGGCACCGAGTCGGTGCGTATG | |
| | GGATCAGGCTTCCACTTTGGAAACCCAGCAAGA | |
| | CACCTGTCTTTT (SEQ ID NO: 1561) | |
| 1562 | GTGAAGACAGGTGTCTTGCTGTTTTAGAGCTAGA | pegRNA*1, 2, 3, 10 |
| | AATAGCAAGTTAAAATAAGGCTAGTCCGTTATCA | |
| | ACTTGAAAAAGTGGCACCGAGTCGGTGCTCTGTA | |
| | TGGGATCAGGCTTCCACTTTGGAAACCCAGCAA | |
| | GACACCTGTCTT (SEQ ID NO: 1562) | |
| 1563 | GTGAAGACAGGTGTCTTGCTGTTTTAGAGCTAGA | pegRNA*1, 2, 3, 10 |
| | AATAGCAAGTTAAAATAAGGCTAGTCCGTTATCA | |
| | ACTTGAAAAAGTGGCACCGAGTCGGTGCTTTCTG | |
| | TATGGGATCAGGCTTCCACTTTGGAAACCCAGCA | |
| | AGACACCTGTC (SEQ ID NO: 1563) | |
| 1564 | GTGAAGACAGGTGTCTTGCTGTTTTAGAGCTAGA | pegRNA*1, 2, 3, 10, contains 3′ TTTT |
| | AATAGCAAGTTAAAATAAGGCTAGTCCGTTATCA | |
| | ACTTGAAAAAGTGGCACCGAGTCGGTGCGTATG | |
| | GGATCAGGCTTCCACTTTGGAAACCCAGCAAGA | |
| | CACCTGTCTTTTT (SEQ ID NO: 1564) | |
| 1565 | GTGAAGACAGGTGTCTTGCTGTTTTAGAGCTAGA | pegRNA*1, 2, 3, 10, contains 3′ TTTT |
| | AATAGCAAGTTAAAATAAGGCTAGTCCGTTATCA | |
| | ACTTGAAAAAGTGGCACCGAGTCGGTGCTCTGTA | |
| | TGGGATCAGGCTTCCACTTTGGAAACCCAGCAA | |
| | GACACCTGTTTT (SEQ ID NO: 1565) | |
| 1566 | GTGAAGACAGGTGTCTTGCTGTTTTAGAGCTAGA | pegRNA*1, 2, 3, 10, contains 3′ TTTT |
| | AATAGCAAGTTAAAATAAGGCTAGTCCGTTATCA | |
| | ACTTGAAAAAGTGGCACCGAGTCGGTGCTTTCTG | |
| | TATGGGATCAGGCTTCCACTTTGGAAACCCAGCA | |
| | AGACACCTTTT (SEQ ID NO: 1566) | |
| 1567 | GTGAAGACAGGTGTCTTGCTGTTTTAGAGCTAGA | pegRNA*1, 2, 3, 10 |
| | AATAGCAAGTTAAAATAAGGCTAGTCCGTTATCA | |
| | ACTTGAAAAAGTGGCACCGAGTCGGTGCTTTCTG | |
| | TATGGGATCAGGCTTCCACTTTGGAAACCCAGCA | |
| | AGACACCTGTCTT (SEQ ID NO: 1567) | |
| 1568 | GTGAAGACAGGTGTCTTGCTGTTTTAGAGCTAGA | pegRNA*1, 2, 3, 10, contains 3′ TTTT |
| | AATAGCAAGTTAAAATAAGGCTAGTCCGTTATCA | |
| | ACTTGAAAAAGTGGCACCGAGTCGGTGCTCTGTA | |
| | TGGGATCAGGCTTCCACTTTGGAAACCCAGCAA | |
| | GACACCTGTCTTTT (SEQ ID NO: 1568) | |
| 1569 | GTGAAGACAGGTGTCTTGCTGTTTTAGAGCTAGA | pegRNA*1, 2, 3, 10, contains 3′ TTTT |
| | AATAGCAAGTTAAAATAAGGCTAGTCCGTTATCA | |
| | ACTTGAAAAAGTGGCACCGAGTCGGTGCTTTCTG | |
| | TATGGGATCAGGCTTCCACTTTGGAAACCCAGCA | |
| | AGACACCTGTTTT (SEQ ID NO: 1569) | |
| 1570 | GTGAAGACAGGTGTCTTGCTGTTTTAGAGCTAGA | pegRNA*1, 2, 3, 10, contains 3′ TTTT |
| | AATAGCAAGTTAAAATAAGGCTAGTCCGTTATCA | |
| | ACTTGAAAAAGTGGCACCGAGTCGGTGCTCTGTA | |
| | TGGGATCAGGCTTCCACTTTGGAAACCCAGCAA | |
| | GACACCTGTCTTTTTT (SEQ ID NO: 1570) | |
| 1571 | GTGAAGACAGGTGTCTTGCTGTTTTAGAGCTAGA | pegRNA*1, 2, 3, 10, contains 3′ TTTT |
| | AATAGCAAGTTAAAATAAGGCTAGTCCGTTATCA | |
| | ACTTGAAAAAGTGGCACCGAGTCGGTGCTTTCTG | |
| | TATGGGATCAGGCTTCCACTTTGGAAACCCAGCA | |
| | AGACACCTGTCTTTT (SEQ ID NO: 1571) | |
| 1572 | GTGAAGACAGGTGTCTTGCTGTTTTAGAGCTAGA | pegRNA*1, 2, 3, 10, contains 3′ TTTT |
| | AATAGCAAGTTAAAATAAGGCTAGTCCGTTATCA | |
| | ACTTGAAAAAGTGGCACCGAGTCGGTGCTTTCTG | |
| | TATGGGATCAGGCTTCCACTTTGGAAACCCAGCA | |
| | AGACACCTGTCTTTTTT (SEQ ID NO: 1572) | |
| 1573 | GTGAAGACAGGTGTCTTGCTGTTTTAGAGCTAGA | pegRNA*1, 2, 3, 10, contains linker |
| | AATAGCAAGTTAAAATAAGGCTAGTCCGTTATCA | sequence AACATTGA; hairpin SEQ ID NO: 3591; |
| | ACTTGAAAAAGTGGCACCGAGTCGGTGCATGGG | 3′ TTTT |
| | ATCAGGCTTCCACTTTGGAAACCCAGCAAGACA | |
| | CCAACATTGACGCGTCTCTACGTGGGGGCGCGTT | |
| | TT (SEQ ID NO: 1573) | |
| 1574 | GTGAAGACAGGTGTCTTGCTGTTTTAGAGCTAGA | pegRNA*1, 2, 3, 10, contains linker |
| | AATAGCAAGTTAAAATAAGGCTAGTCCGTTATCA | sequence AACATTGA; hairpin SEQ ID NO: 3591; |
| | ACTTGAAAAAGTGGCACCGAGTCGGTGCATGGG | 3′ TTTT |
| | ATCAGGCTTCCACTTTGGAAACCCAGCAAGACA | |
| | CCTGAACATTGACGCGTCTCTACGTGGGGGCGCG | |
| | TTTT (SEQ ID NO: 1574) | |
| 1575 | GTGAAGACAGGTGTCTTGCTGTTTTAGAGCTAGA | pegRNA*1, 2, 3, 10, contains linker |
| | AATAGCAAGTTAAAATAAGGCTAGTCCGTTATCA | sequence AACATTGA; hairpin SEQ ID NO: 3591; |
| | ACTTGAAAAAGTGGCACCGAGTCGGTGCGTATG | 3′ TTTT |
| | GGATCAGGCTTCCACTTTGGAAACCCAGCAAGA | |
| | CACCAACATTGACGCGTCTCTACGTGGGGGCGC | |
| | GTTTT (SEQ ID NO: 1575) | |
| 1576 | GTGAAGACAGGTGTCTTGCTGTTTTAGAGCTAGA | pegRNA*1, 2, 3, 10, contains linker |
| | AATAGCAAGTTAAAATAAGGCTAGTCCGTTATCA | sequence AACATTGA; hairpin SEQ ID NO: 3591; |
| | ACTTGAAAAAGTGGCACCGAGTCGGTGCATGGG | 3′ TTTT |
| | ATCAGGCTTCCACTTTGGAAACCCAGCAAGACA | |
| | CCTGTCAACATTGACGCGTCTCTACGTGGGGGCG | |
| | CGTTTT (SEQ ID NO: 1576) | |
| 1577 | GTGAAGACAGGTGTCTTGCTGTTTTAGAGCTAGA | pegRNA*1, 2, 3, 10, contains linker |
| | AATAGCAAGTTAAAATAAGGCTAGTCCGTTATCA | sequence AACATTGA; hairpin SEQ ID NO: 3591; |
| | ACTTGAAAAAGTGGCACCGAGTCGGTGCGTATG | 3′ TTTT |
| | GGATCAGGCTTCCACTTTGGAAACCCAGCAAGA | |
| | CACCTGAACATTGACGCGTCTCTACGTGGGGGCG | |
| | CGTTTT (SEQ ID NO: 1577) | |
| 1578 | GTGAAGACAGGTGTCTTGCTGTTTTAGAGCTAGA | pegRNA*1, 2, 3, 10, contains linker |
| | AATAGCAAGTTAAAATAAGGCTAGTCCGTTATCA | sequence AACATTGA; hairpin SEQ ID NO: 3591; |
| | ACTTGAAAAAGTGGCACCGAGTCGGTGCTCTGTA | 3′ TTTT |
| | TGGGATCAGGCTTCCACTTTGGAAACCCAGCAA | |
| | GACACCAACATTGACGCGTCTCTACGTGGGGGC | |
| | GCGTTTT (SEQ ID NO: 1578) | |
| 1579 | GTGAAGACAGGTGTCTTGCTGTTTTAGAGCTAGA | pegRNA*1, 2, 3, 10, contains linker |
| | AATAGCAAGTTAAAATAAGGCTAGTCCGTTATCA | sequence AACATTGA; hairpin SEQ ID NO: 3591; |
| | ACTTGAAAAAGTGGCACCGAGTCGGTGCATGGG | 3′ TTTT |
| | ATCAGGCTTCCACTTTGGAAACCCAGCAAGACA | |
| | CCTGTCTTAACATTGACGCGTCTCTACGTGGGGG | |
| | CGCGTTTT (SEQ ID NO: 1579) | |
| 1580 | GTGAAGACAGGTGTCTTGCTGTTTTAGAGCTAGA | pegRNA*1, 2, 3, 10, contains linker |
| | AATAGCAAGTTAAAATAAGGCTAGTCCGTTATCA | sequence AACATTGA; hairpin SEQ ID NO: 3591; |
| | ACTTGAAAAAGTGGCACCGAGTCGGTGCGTATG | 3′ TTTT |
| | GGATCAGGCTTCCACTTTGGAAACCCAGCAAGA | |
| | CACCTGTCAACATTGACGCGTCTCTACGTGGGGG | |
| | CGCGTTTT (SEQ ID NO: 1580) | |
| 1581 | GTGAAGACAGGTGTCTTGCTGTTTTAGAGCTAGA | pegRNA*1, 2, 3, 10, contains linker |
| | AATAGCAAGTTAAAATAAGGCTAGTCCGTTATCA | sequence AACATTGA; hairpin SEQ ID NO: 3591; |
| | ACTTGAAAAAGTGGCACCGAGTCGGTGCGTATG | 3′ TTTT |
| | GGATCAGGCTTCCACTTTGGAAACCCAGCAAGA | |
| | CACCTGTCTAACATTGACGCGTCTCTACGTGGGG | |
| | GCGCGTTTT (SEQ ID NO: 1581) | |
| 1582 | GTGAAGACAGGTGTCTTGCTGTTTTAGAGCTAGA | pegRNA*1, 2, 3, 10, contains linker |
| | AATAGCAAGTTAAAATAAGGCTAGTCCGTTATCA | sequence AACATTGA ;hairpin SEQ ID NO: 3591; |
| | ACTTGAAAAAGTGGCACCGAGTCGGTGCTCTGTA | 3′ TTTT |
| | TGGGATCAGGCTTCCACTTTGGAAACCCAGCAA | |
| | GACACCTGAACATTGACGCGTCTCTACGTGGGG | |
| | GCGCGTTTT (SEQ ID NO: 1582) | |
| 1583 | GTGAAGACAGGTGTCTTGCTGTTTTAGAGCTAGA | pegRNA*1, 2, 3, 10, contains linker |
| | AATAGCAAGTTAAAATAAGGCTAGTCCGTTATCA | sequence AACATTGA; hairpin SEQ ID NO: 3591; |
| | ACTTGAAAAAGTGGCACCGAGTCGGTGCTTTCTG | 3′ TTTT |
| | TATGGGATCAGGCTTCCACTTTGGAAACCCAGCA | |
| | AGACACCAACATTGACGCGTCTCTACGTGGGGG | |
| | CGCGTTTT (SEQ ID NO: 1583) | |
| 1584 | GTGAAGACAGGTGTCTTGCTGTTTTAGAGCTAGA | pegRNA*1, 2, 3, 10, contains linker |
| | AATAGCAAGTTAAAATAAGGCTAGTCCGTTATCA | sequence AACATTGA; hairpin SEQ ID NO: 3591; |
| | ACTTGAAAAAGTGGCACCGAGTCGGTGCTCTGTA | 3′ TTTT |
| | TGGGATCAGGCTTCCACTTTGGAAACCCAGCAA | |
| | GACACCTGTCAACATTGACGCGTCTCTACGTGGG | |
| | GGCGCGTTTT (SEQ ID NO: 1584) | |
| 1585 | GTGAAGACAGGTGTCTTGCTGTTTTAGAGCTAGA | pegRNA*1, 2, 3, 10, contains linker |
| | AATAGCAAGTTAAAATAAGGCTAGTCCGTTATCA | sequence AACATTGA; hairpin SEQ ID NO: 3591; |
| | ACTTGAAAAAGTGGCACCGAGTCGGTGCTTTCTG | 3′ TTTT |
| | TATGGGATCAGGCTTCCACTTTGGAAACCCAGCA | |
| | AGACACCTGAACATTGACGCGTCTCTACGTGGG | |
| | GGCGCGTTTT (SEQ ID NO: 1585) | |
| 1586 | GTGAAGACAGGTGTCTTGCTGTTTTAGAGCTAGA | pegRNA*1, 2, 3, 10, contains linker |
| | AATAGCAAGTTAAAATAAGGCTAGTCCGTTATCA | sequence AACATTGA; hairpin SEQ ID NO: 3591; |
| | ACTTGAAAAAGTGGCACCGAGTCGGTGCTCTGTA | 3′ TTTT |
| | TGGGATCAGGCTTCCACTTTGGAAACCCAGCAA | |
| | GACACCTGTCTTAACATTGACGCGTCTCTACGTG | |
| | GGGGCGCGTTTT (SEQ ID NO: 1586) | |
| 1587 | GTGAAGACAGGTGTCTTGCTGTTTTAGAGCTAGA | pegRNA*1, 2, 3, 10, contains linker |
| | AATAGCAAGTTAAAATAAGGCTAGTCCGTTATCA | sequence AACATTGA; hairpin SEQ ID NO: 3591; |
| | ACTTGAAAAAGTGGCACCGAGTCGGTGCTTTCTG | 3′ TTTT |
| | TATGGGATCAGGCTTCCACTTTGGAAACCCAGCA | |
| | AGACACCTGTCAACATTGACGCGTCTCTACGTGG | |
| | GGGCGCGTTTT (SEQ ID NO: 1587) | |
| 1588 | GTGAAGACAGGTGTCTTGCTGTTTTAGAGCTAGA | pegRNA*1, 2, 3, 10, contains linker |
| | AATAGCAAGTTAAAATAAGGCTAGTCCGTTATCA | sequence AACATTGA; hairpin SEQ ID NO: 3591; |
| | ACTTGAAAAAGTGGCACCGAGTCGGTGCTTTCTG | 3′ TTTT |
| | TATGGGATCAGGCTTCCACTTTGGAAACCCAGCA | |
| | AGACACCTGTCTTAACATTGACGCGTCTCTACGT | |
| | GGGGGCGCGTTTT (SEQ ID NO: 1588) | |
| 49 | TTTCTTGTGATTATCAGTTTGTTTTAGAGCTAGAA | PE3 ngRNA (TG; TGG PAM) |
| | ATAGCAAGTTAAAATAAGGCTAGTCCGTTATCAA | |
| | CTTGAAAAAGTGGCACCGAGTCGGTGC (SEQ ID | |
| | NO: 49) | |
| 50 | GGATGCAGAAGCTTTCTGTAGTTTTAGAGCTAGA | PE3 ngRNA (TG; TGG PAM) |
| | AATAGCAAGTTAAAATAAGGCTAGTCCGTTATCA | |
| | ACTTGAAAAAGTGGCACCGAGTCGGTGC (SEQ ID | |
| | NO: 50) | |
| 51 | GAAGCTTTCTGTATGGGATCGTTTTAGAGCTAGA | PE3b*3 ngRNA (AG; AGG PAM) |
| | AATAGCAAGTTAAAATAAGGCTAGTCCGTTATCA | |
| | ACTTGAAAAAGTGGCACCGAGTCGGTGC (SEQ ID | |
| | NO: 51) | |
| 52 | ATGGGATCAGGCTTCCACTTGTTTTAGAGCTAGA | PE3b*2 ngRNA (TG; TGG PAM) |
| | AATAGCAAGTTAAAATAAGGCTAGTCCGTTATCA | |
| | ACTTGAAAAAGTGGCACCGAGTCGGTGC (SEQ ID | |
| | NO: 52) | |
| 53 | GGATGCAGAAGCTTTCTGTAGTTTTAGAGCTAGA | PE3 ngRNA (TG; TGG PAM), contains 3′ |
| | AATAGCAAGTTAAAATAAGGCTAGTCCGTTATCA | TTTT |
| | ACTTGAAAAAGTGGCACCGAGTCGGTGCTTTT | |
| | (SEQ ID NO: 53) | |
| 54 | GAAGCTTTCTGTATGGGATCGTTTTAGAGCTAGA | PE3b*3 ngRNA (AG; AGG PAM), contains 3′ |
| | AATAGCAAGTTAAAATAAGGCTAGTCCGTTATCA | TTTT |
| | ACTTGAAAAAGTGGCACCGAGTCGGTGCTTTT | |
| | (SEQ ID NO: 54) | |
| 55 | GTTTCTTGTGATTATCAGTTTGTTTTAGAGCTAGA | PE3 ngRNA (TG; TGG PAM), contains 3′ |
| | AATAGCAAGTTAAAATAAGGCTAGTCCGTTATCA | TTTT; 5′G |
| | ACTTGAAAAAGTGGCACCGAGTCGGTGCTTTT | |
| | (SEQ ID NO: 55) | |
| 56 | GATGGGATCAGGCTTCCACTTGTTTTAGAGCTAG | PE3b*2 ngRNA (TG; TGG PAM), contains 3′ |
| | AAATAGCAAGTTAAAATAAGGCTAGTCCGTTATC | TTTT; 5′G |
| | AACTTGAAAAAGTGGCACCGAGTCGGTGCTTTT | |
| | (SEQ ID NO: 56) | |
| 57 | GGATGCAGAAGCTTTCTGTAGTTTTAGAGCTAGA | PE3 ngRNA (TG; TGG PAM), contains linker |
| | AATAGCAAGTTAAAATAAGGCTAGTCCGTTATCA | sequence AACATTGA; hairpin SEQ ID |
| | ACTTGAAAAAGTGGCACCGAGTCGGTGCAACAT | NO: 3591; 3′ TTTT |
| | TGACGCGTCTCTACGTGGGGGCGCGTTTT (SEQ | |
| | ID NO: 57) | |
| 58 | GAAGCTTTCTGTATGGGATCGTTTTAGAGCTAGA | PE3b*3 ngRNA (AG; AGG PAM), contains |
| | AATAGCAAGTTAAAATAAGGCTAGTCCGTTATCA | linker sequence AACATTGA; hairpin SEQ ID |
| | ACTTGAAAAAGTGGCACCGAGTCGGTGCAACAT | NO: 3591; 3′ TTTT |
| | TGACGCGTCTCTACGTGGGGGCGCGTTTT (SEQ | |
| | ID NO: 58) | |
| 59 | GTTTCTTGTGATTATCAGTTTGTTTTAGAGCTAGA | PE3 ngRNA (TG; TGG PAM), contains linker |
| | AATAGCAAGTTAAAATAAGGCTAGTCCGTTATCA | sequence AACATTGA; hairpin SEQ ID |
| | ACTTGAAAAAGTGGCACCGAGTCGGTGCAACAT | NO: 3591; 3′ TTTT; 5′G |
| | TGACGCGTCTCTACGTGGGGGCGCGTTTT (SEQ | |
| | ID NO: 59) | |
| 60 | GATGGGATCAGGCTTCCACTTGTTTTAGAGCTAG | PE3b*2 ngRNA (TG; TGG PAM), contains |
| | AAATAGCAAGTTAAAATAAGGCTAGTCCGTTATC | linker sequence AACATTGA; hairpin SEQ ID |
| | AACTTGAAAAAGTGGCACCGAGTCGGTGCAACA | NO: 3591; 3′ TTTT; 5′G |
| | TTGACGCGTCTCTACGTGGGGGCGCGTTTT (SEQ | |
| | ID NO: 60) | |
| 3651 | GTGAAGACAGGTGTCTTGCTGTTTTAGAGCTAGA | pegRNA*1, 2, 3, 10, contains linker sequence |
| | AATAGCAAGTTAAAATAAGGCTAGTCCGTTATCA | AACATTGA; hairpin SEQ ID NO: 3591 |
| | ACTTGAAAAAGTGGCACCGAGTCGGTGCATGGG | |
| | ATCAGGCTTCCACTTTGGAAACCCAGCAAGACA | |
| | CCTGAACATTGACGCGTCTCTACGTGGGGGCGCG | |
| | (SEQ ID NO: 3651) | |
| 3652 | GTGAAGACAGGTGTCTTGCTGTTTTAGAGCTAGA | pegRNA*1, 2, 3, 10, contains linker sequence |
| | AATAGCAAGTTAAAATAAGGCTAGTCCGTTATCA | AACATTGA; hairpin SEQ ID NO: 3591 |
| | ACTTGAAAAAGTGGCACCGAGTCGGTGCGTATG | |
| | GGATCAGGCTTCCACTTTGGAAACCCAGCAAGA | |
| | CACCAACATTGACGCGTCTCTACGTGGGGGCGC | |
| | G (SEQ ID NO: 3652) | |
| 3653 | GTGAAGACAGGTGTCTTGCTGTTTTAGAGCTAGA | pegRNA*1, 2, 3, 10, contains linker sequence |
| | AATAGCAAGTTAAAATAAGGCTAGTCCGTTATCA | AACATTGA; hairpin SEQ ID NO: 3591 |
| | ACTTGAAAAAGTGGCACCGAGTCGGTGCATGGG | |
| | ATCAGGCTTCCACTTTGGAAACCCAGCAAGACA | |
| | CCTGTCAACATTGACGCGTCTCTACGTGGGGGCG | |
| | CG (SEQ ID NO: 3653) | |
| 3654 | GTGAAGACAGGTGTCTTGCTGTTTTAGAGCTAGA | pegRNA*1, 2, 3, 10, contains linker sequence |
| | AATAGCAAGTTAAAATAAGGCTAGTCCGTTATCA | AACATTGA; hairpin SEQ ID NO: 3591 |
| | ACTTGAAAAAGTGGCACCGAGTCGGTGCGTATG | |
| | GGATCAGGCTTCCACTTTGGAAACCCAGCAAGA | |
| | CACCTGAACATTGACGCGTCTCTACGTGGGGGCG | |
| | CG (SEQ ID NO: 3654) | |
| 3655 | GTGAAGACAGGTGTCTTGCTGTTTTAGAGCTAGA | pegRNA*1, 2, 3, 10, contains linker sequence |
| | AATAGCAAGTTAAAATAAGGCTAGTCCGTTATCA | AACATTGA; hairpin SEQ ID NO: 3591 |
| | ACTTGAAAAAGTGGCACCGAGTCGGTGCTCTGTA | |
| | TGGGATCAGGCTTCCACTTTGGAAACCCAGCAA | |
| | GACACCAACATTGACGCGTCTCTACGTGGGGGC | |
| | GCG (SEQ ID NO: 3655) | |
| 3656 | GTGAAGACAGGTGTCTTGCTGTTTTAGAGCTAGA | pegRNA*1, 2, 3, 10, contains linker sequence |
| | AATAGCAAGTTAAAATAAGGCTAGTCCGTTATCA | AACATTGA; hairpin SEQ ID NO: 3591 |
| | ACTTGAAAAAGTGGCACCGAGTCGGTGCATGGG | |
| | ATCAGGCTTCCACTTTGGAAACCCAGCAAGACA | |
| | CCTGTCTTAACATTGACGCGTCTCTACGTGGGGG | |
| | CGCG (SEQ ID NO: 3656) | |
| 3657 | GTGAAGACAGGTGTCTTGCTGTTTTAGAGCTAGA | pegRNA*1, 2, 3, 10, contains linker sequence |
| | AATAGCAAGTTAAAATAAGGCTAGTCCGTTATCA | AACATTGA; hairpin SEQ ID NO: 3591 |
| | ACTTGAAAAAGTGGCACCGAGTCGGTGCGTATG | |
| | GGATCAGGCTTCCACTTTGGAAACCCAGCAAGA | |
| | CACCTGTCAACATTGACGCGTCTCTACGTGGGGG | |
| | CGCG (SEQ ID NO: 3657) | |
| 3658 | GTGAAGACAGGTGTCTTGCTGTTTTAGAGCTAGA | pegRNA*1, 2, 3, 10, contains linker sequence |
| | AATAGCAAGTTAAAATAAGGCTAGTCCGTTATCA | AACATTGA; hairpin SEQ ID NO: 3591 |
| | ACTTGAAAAAGTGGCACCGAGTCGGTGCGTATG | |
| | GGATCAGGCTTCCACTTTGGAAACCCAGCAAGA | |
| | CACCTGTCTAACATTGACGCGTCTCTACGTGGGG | |
| | GCGCG (SEQ ID NO: 3658) | |
| 3659 | GTGAAGACAGGTGTCTTGCTGTTTTAGAGCTAGA | pegRNA*1, 2, 3, 10, contains linker sequence |
| | AATAGCAAGTTAAAATAAGGCTAGTCCGTTATCA | AACATTGA; hairpin SEQ ID NO: 3591 |
| | ACTTGAAAAAGTGGCACCGAGTCGGTGCTCTGTA | |
| | TGGGATCAGGCTTCCACTTTGGAAACCCAGCAA | |
| | GACACCTGAACATTGACGCGTCTCTACGTGGGG | |
| | GCGCG (SEQ ID NO: 3659) | |
| 3660 | GTGAAGACAGGTGTCTTGCTGTTTTAGAGCTAGA | pegRNA*1, 2, 3, 10, contains linker sequence |
| | AATAGCAAGTTAAAATAAGGCTAGTCCGTTATCA | AACATTGA; hairpin SEQ ID NO: 3591 |
| | ACTTGAAAAAGTGGCACCGAGTCGGTGCTTTCTG | |
| | TATGGGATCAGGCTTCCACTTTGGAAACCCAGCA | |
| | AGACACCAACATTGACGCGTCTCTACGTGGGGG | |
| | CGCG (SEQ ID NO: 3660) | |
| 3661 | GTGAAGACAGGTGTCTTGCTGTTTTAGAGCTAGA | pegRNA*1, 2, 3, 10, contains linker sequence |
| | AATAGCAAGTTAAAATAAGGCTAGTCCGTTATCA | AACATTGA; hairpin SEQ ID NO: 3591 |
| | ACTTGAAAAAGTGGCACCGAGTCGGTGCTCTGTA | |
| | TGGGATCAGGCTTCCACTTTGGAAACCCAGCAA | |
| | GACACCTGTCAACATTGACGCGTCTCTACGTGGG | |
| | GGCGCG (SEQ ID NO: 3661) | |
| 3662 | GTGAAGACAGGTGTCTTGCTGTTTTAGAGCTAGA | pegRNA*1, 2, 3, 10, contains linker sequence |
| | AATAGCAAGTTAAAATAAGGCTAGTCCGTTATCA | AACATTGA; hairpin SEQ ID NO: 3591 |
| | ACTTGAAAAAGTGGCACCGAGTCGGTGCTTTCTG | |
| | TATGGGATCAGGCTTCCACTTTGGAAACCCAGCA | |
| | AGACACCTGAACATTGACGCGTCTCTACGTGGG | |
| | GGCGCG (SEQ ID NO: 3662) | |
| 3663 | GTGAAGACAGGTGTCTTGCTGTTTTAGAGCTAGA | pegRNA*1, 2, 3, 10, contains linker sequence |
| | AATAGCAAGTTAAAATAAGGCTAGTCCGTTATCA | AACATTGA; hairpin SEQ ID NO: 3591 |
| | ACTTGAAAAAGTGGCACCGAGTCGGTGCTCTGTA | |
| | TGGGATCAGGCTTCCACTTTGGAAACCCAGCAA | |
| | GACACCTGTCTTAACATTGACGCGTCTCTACGTG | |
| | GGGGCGCG (SEQ ID NO: 3663) | |
| 3664 | GTGAAGACAGGTGTCTTGCTGTTTTAGAGCTAGA | pegRNA*1, 2, 3, 10, contains linker sequence |
| | AATAGCAAGTTAAAATAAGGCTAGTCCGTTATCA | AACATTGA; hairpin SEQ ID NO: 3591 |
| | ACTTGAAAAAGTGGCACCGAGTCGGTGCTTTCTG | |
| | TATGGGATCAGGCTTCCACTTTGGAAACCCAGCA | |
| | AGACACCTGTCAACATTGACGCGTCTCTACGTGG | |
| | GGGCGCG (SEQ ID NO: 3664) | |
| 3665 | GTGAAGACAGGTGTCTTGCTGTTTTAGAGCTAGA | pegRNA*1, 2, 3, 10, contains linker sequence |
| | AATAGCAAGTTAAAATAAGGCTAGTCCGTTATCA | AACATTGA; hairpin SEQ ID NO: 3591 |
| | ACTTGAAAAAGTGGCACCGAGTCGGTGCTTTCTG | |
| | TATGGGATCAGGCTTCCACTTTGGAAACCCAGCA | |
| | AGACACCTGTCTTAACATTGACGCGTCTCTACGT | |
| | GGGGGCGCG (SEQ ID NO: 3665) | |

TABLE 20

| Sequence | | |
|---|---|---|
| Number | Sequence | Description |
| 1589 | ATTATCAGTTTTGGATG (SEQ ID NO: 1589) | PEgRNA spacer (CAG PAM) |
| 1590 | GATTATCAGTTTTGGATG (SEQ ID NO: 1590) | PEgRNA spacer (CAG PAM) |
| 1591 | TGATTATCAGTTTTGGATG (SEQ ID NO: 1591) | PEgRNA spacer (CAG PAM) |
| 1226 | GTGATTATCAGTTTTGGATG (SEQ ID NO: 1226) | PEgRNA spacer (CAG PAM) |
| 1592 | TGTGATTATCAGTTTTGGATG (SEQ ID NO: 1592) | PEgRNA spacer (CAG PAM) |
| 1593 | TTGTGATTATCAGTTTTGGATG (SEQ ID NO: 1593) | PEgRNA spacer (CAG PAM) |
| 1594 | CCAAA | PBS |
| 1595 | CCAAAA | PBS |
| 1596 | CCAAAAC | PBS |
| 1597 | CCAAAACT | PBS |
| 1598 | CCAAAACTG | PBS |
| 1599 | CCAAAACTGA (SEQ ID NO: 1599) | PBS |
| 1600 | CCAAAACTGAT (SEQ ID NO: 1600) | PBS |
| 1601 | CCAAAACTGATA (SEQ ID NO: 1601) | PBS |
| 1602 | CCAAAACTGATAA (SEQ ID NO: 1602) | PBS |
| 1603 | CCAAAACTGATAAT (SEQ ID NO: 1603) | PBS |
| 1604 | CCAAAACTGATAATC (SEQ ID NO: 1604) | PBS |
| 1605 | CCAAAACTGATAATCA (SEQ ID NO: 1605) | PBS |
| 1606 | CCAAAACTGATAATCAC (SEQ ID NO: 1606) | PBS |
| 1607 | CCAAAACTGATAATCACA (SEQ ID NO: 1607) | PBS |
| 1608 | CCAAAACTGATAATCACAA (SEQ ID NO: 1608) | PBS |
| 1609 | CCCATACAGAAAGCTTCTGCAT (SEQ ID NO: 1609) | RTT |
| 1610 | CCCATACAGAAAGCTTTTGCAT (SEQ ID NO: 1610) | RTT (CAG-to-CAA PAM silencing edit) |
| 1611 | TCCCATACAGAAAGCTTCTGCAT (SEQ ID NO: | RTT |
| | 1611) | |
| 1612 | TCCCATACAGAAAGCTTTTGCAT (SEQ ID NO: | RTT (CAG-to-CAA PAM silencing edit) |
| | 1612) | |
| 1613 | ATCCCATACAGAAAGCTTCTGCAT (SEQ ID NO: | RTT |
| | 1613) | |
| 1614 | ATCCCATACAGAAAGCTTTTGCAT (SEQ ID NO: | RTT (CAG-to-CAA PAM silencing edit) |
| | 1614) | |
| 1615 | GATCCCATACAGAAAGCTTCTGCAT (SEQ ID NO: | RTT |
| | 1615) | |
| 1616 | GATCCCATACAGAAAGCTTTTGCAT (SEQ ID NO: | RTT (CAG-to-CAA PAM silencing edit) |
| | 1616) | |
| 1617 | TGATCCCATACAGAAAGCTTCTGCAT (SEQ ID | RTT |
| | NO: 1617) | |
| 1618 | TGATCCCATACAGAAAGCTTTTGCAT (SEQ ID | RTT (CAG-to-CAA PAM silencing edit) |
| | NO: 1618) | |
| 1619 | CTGATCCCATACAGAAAGCTTCTGCAT (SEQ ID | RTT |
| | NO: 1619) | |
| 1620 | CTGATCCCATACAGAAAGCTTTTGCAT (SEQ ID | RTT (CAG-to-CAA PAM silencing edit) |
| | NO: 1620) | |
| 1621 | CCTGATCCCATACAGAAAGCTTCTGCAT (SEQ ID | RTT |
| | NO: 1621) | |
| 1622 | CCTGATCCCATACAGAAAGCTTTTGCAT (SEQ ID | RTT (CAG-to-CAA PAM silencing edit) |
| | NO: 1622) | |
| 1623 | GCCTGATCCCATACAGAAAGCTTCTGCAT (SEQ | RTT |
| | ID NO: 1623) | |
| 1624 | GCCTGATCCCATACAGAAAGCTTTTGCAT (SEQ | RTT (CAG-to-CAA PAM silencing edit) |
| | ID NO: 1624) | |
| 1625 | AGCCTGATCCCATACAGAAAGCTTCTGCAT (SEQ | RTT |
| | ID NO: 1625) | |
| 1626 | AGCCTGATCCCATACAGAAAGCTTTTGCAT (SEQ | RTT (CAG-to-CAA PAM silencing edit) |
| | ID NO: 1626) | |
| 1627 | AAGCCTGATCCCATACAGAAAGCTTCTGCAT | RTT |
| | (SEQ ID NO: 1627) | |
| 1628 | AAGCCTGATCCCATACAGAAAGCTTTTGCAT | RTT (CAG-to-CAA PAM silencing edit) |
| | (SEQ ID NO: 1628) | |
| 1629 | GAAGCCTGATCCCATACAGAAAGCTTCTGCAT | RTT |
| | (SEQ ID NO: 1629) | |
| 1630 | GAAGCCTGATCCCATACAGAAAGCTTTTGCAT | RTT (CAG-to-CAA PAM silencing edit) |
| | (SEQ ID NO: 1630) | |
| 1631 | GGAAGCCTGATCCCATACAGAAAGCTTCTGCAT | RTT |
| | (SEQ ID NO: 1631) | |
| 1632 | GGAAGCCTGATCCCATACAGAAAGCTTTTGCAT | RTT (CAG-to-CAA PAM silencing edit) |
| | (SEQ ID NO: 1632) | |
| 1633 | TGGAAGCCTGATCCCATACAGAAAGCTTCTGCAT | RTT |
| | (SEQ ID NO: 1633) | |
| 1634 | TGGAAGCCTGATCCCATACAGAAAGCTTTTGCAT | RTT (CAG-to-CAA PAM silencing edit) |
| | (SEQ ID NO: 1634) | |
| 1635 | GTGGAAGCCTGATCCCATACAGAAAGCTTCTGC | RTT |
| | AT (SEQ ID NO: 1635) | |
| 1636 | GTGGAAGCCTGATCCCATACAGAAAGCTTTTGCA | RTT (CAG-to-CAA PAM silencing edit) |
| | T (SEQ ID NO: 1636) | |
| 1637 | AGTGGAAGCCTGATCCCATACAGAAAGCTTCTG | RTT |
| | CAT (SEQ ID NO: 1637) | |
| 1638 | AGTGGAAGCCTGATCCCATACAGAAAGCTTTTGC | RTT (CAG-to-CAA PAM silencing edit) |
| | AT (SEQ ID NO: 1638) | |
| 1639 | AAGTGGAAGCCTGATCCCATACAGAAAGCTTCT | RTT |
| | GCAT (SEQ ID NO: 1639) | |
| 1640 | AAGTGGAAGCCTGATCCCATACAGAAAGCTTTTG | RTT (CAG-to-CAA PAM silencing edit) |
| | CAT (SEQ ID NO: 1640) | |
| 1641 | AAAGTGGAAGCCTGATCCCATACAGAAAGCTTC | RTT |
| | TGCAT (SEQ ID NO: 1641) | |
| 1642 | AAAGTGGAAGCCTGATCCCATACAGAAAGCTTTT | RTT (CAG-to-CAA PAM silencing edit) |
| | GCAT (SEQ ID NO: 1642) | |
| 1643 | CAAAGTGGAAGCCTGATCCCATACAGAAAGCTT | RTT |
| | CTGCAT (SEQ ID NO: 1643) | |
| 1644 | CAAAGTGGAAGCCTGATCCCATACAGAAAGCTT | RTT (CAG-to-CAA PAM silencing edit) |
| | TTGCAT (SEQ ID NO: 1644) | |
| 1645 | CCAAAGTGGAAGCCTGATCCCATACAGAAAGCT | RTT |
| | TCTGCAT (SEQ ID NO: 1645) | |
| 1646 | CCAAAGTGGAAGCCTGATCCCATACAGAAAGCT | RTT (CAG-to-CAA PAM silencing edit) |
| | TTTGCAT (SEQ ID NO: 1646) | |
| 480 | AAGGCTTCATACATCTTCCT (SEQ ID NO: 480) | PE3 ngRNA spacer (TAG PAM) |
| 481 | AGTGGAAGCCTGATCCCATA (SEQ ID NO: 481) | PE3b ngRNA spacer (CAG PAM) |
| 482 | CACTACTTACCATCTCTTTC (SEQ ID NO: 482) | PE3 ngRNA spacer (AAG PAM) |
| 483 | CCTTAGGAACTCCTGGAACT (SEQ ID NO: 483) | PE3 ngRNA spacer (GAG PAM) |
| 484 | GAAGCCTGATCCCATACAGA (SEQ ID NO: 484) | PE3b ngRNA spacer (AAG PAM) |
| 485 | GGAACTGAGCCACGTGAAGA (SEQ ID NO: 485) | PE3 ngRNA spacer (CAG PAM) |
| 486 | GGTGTCTTGCTGGGTTTCCA (SEQ ID NO: 486) | PE3 ngRNA spacer (AAG PAM) |
| 487 | TCCTGGAACTGAGCCACGTG (SEQ ID NO: 487) | PE3 ngRNA spacer (AAG PAM) |
| 488 | TTGCTGGGTTTCCAAAGTGG (SEQ ID NO: 488) | PE3 ngRNA spacer (AAG PAM) |

TABLE 21

| Sequence | | |
|---|---|---|
| Number | Sequence | Description |
| 1647 | TCTTGCTGGGTTTCCAA (SEQ ID NO: 1647) | PEgRNA spacer (AG PAM) |
| 1648 | GTCTTGCTGGGTTTCCAA (SEQ ID NO: 1648) | PEgRNA spacer (AG PAM) |
| 1649 | TGTCTTGCTGGGTTTCCAA (SEQ ID NO: 1649) | PEgRNA spacer (AG PAM) |
| 214 | GTGTCTTGCTGGGTTTCCAA (SEQ ID NO: 214) | PERNA spacer (AG PAM) |
| 1650 | GGTGTCTTGCTGGGTTTCCAA (SEQ ID NO: 1650) | PEgRNA spacer (AG PAM) |
| 1651 | AGGTGTCTTGCTGGGTTTCCAA (SEQ ID NO: 1651) | PEgRNA spacer (AG PAM) |
| 1652 | GAAAC | PBS |
| 1653 | GAAACC | PBS |
| 1654 | GAAACCC | PBS |
| 1655 | GAAACCCA | PBS |
| 1656 | GAAACCCAG | PBS |
| 1657 | GAAACCCAGC (SEQ ID NO: 1657) | PBS |
| 1658 | GAAACCCAGCA (SEQ ID NO: 1658) | PBS |
| 1659 | GAAACCCAGCAA (SEQ ID NO: 1659) | PBS |
| 1660 | GAAACCCAGCAAG (SEQ ID NO: 1660) | PBS |
| 1661 | GAAACCCAGCAAGA (SEQ ID NO: 1661) | PBS |
| 1662 | GAAACCCAGCAAGAC (SEQ ID NO: 1662) | PBS |
| 1663 | GAAACCCAGCAAGACA (SEQ ID NO: 1663) | PBS |
| 1664 | GAAACCCAGCAAGACAC (SEQ ID NO: 1664) | PBS |
| 1665 | GAAACCCAGCAAGACACC (SEQ ID NO: 1665) | PBS |
| 1666 | GAAACCCAGCAAGACACCT (SEQ ID NO: 1666) | PBS |
| 1667 | GATCAGGCTTCCACTTTG (SEQ ID NO: 1667) | RTT |
| 1668 | GGATCAGGCTTCCACTTTG (SEQ ID NO: 1668) | RTT |
| 1669 | GGGATCAGGCTTCCACTTTG (SEQ ID NO: 1669) | RTT |
| 1670 | TGGGATCAGGCTTCCACTTTG (SEQ ID NO: 1670) | RTT |
| 1671 | ATGGGATCAGGCTTCCACTTTG (SEQ ID NO: 1671) | RTT |
| 1672 | TATGGGATCAGGCTTCCACTTTG (SEQ ID NO: | RTT |
| | 1672) | |
| 1673 | GTATGGGATCAGGCTTCCACTTTG (SEQ ID NO: | RTT |
| | 1673) | |
| 1674 | TGTATGGGATCAGGCTTCCACTTTG (SEQ ID NO: | RTT |
| | 1674) | |
| 1675 | CTGTATGGGATCAGGCTTCCACTTTG (SEQ ID NO: | RTT |
| | 1675) | |
| 1676 | TCTGTATGGGATCAGGCTTCCACTTTG (SEQ ID | RTT |
| | NO: 1676) | |
| 1677 | TTCTGTATGGGATCAGGCTTCCACTTTG (SEQ ID | RTT |
| | NO: 1677) | |
| 1678 | TTTCTGTATGGGATCAGGCTTCCACTTTG (SEQ ID | RTT |
| | NO: 1678) | |
| 1679 | CTTTCTGTATGGGATCAGGCTTCCACTTTG (SEQ | RTT |
| | ID NO: 1679) | |
| 1680 | GCTTTCTGTATGGGATCAGGCTTCCACTTTG (SEQ | RTT |
| | ID NO: 1680) | |
| 1681 | AGCTTTCTGTATGGGATCAGGCTTCCACTTTG | RTT |
| | (SEQ ID NO: 1681) | |
| 1682 | AAGCTTTCTGTATGGGATCAGGCTTCCACTTTG | RTT |
| | (SEQ ID NO: 1682) | |
| 1683 | GAAGCTTTCTGTATGGGATCAGGCTTCCACTTTG | RTT |
| | (SEQ ID NO: 1683) | |
| 1684 | AGAAGCTTTCTGTATGGGATCAGGCTTCCACTTT | RTT |
| | G (SEQ ID NO: 1684) | |
| 1685 | CAGAAGCTTTCTGTATGGGATCAGGCTTCCACTT | RTT |
| | TG (SEQ ID NO: 1685) | |
| 1686 | GCAGAAGCTTTCTGTATGGGATCAGGCTTCCACT | RTT |
| | TTG (SEQ ID NO: 1686) | |
| 1687 | TGCAGAAGCTTTCTGTATGGGATCAGGCTTCCAC | RTT |
| | TTTG (SEQ ID NO: 1687) | |
| 1688 | ATGCAGAAGCTTTCTGTATGGGATCAGGCTTCCA | RTT |
| | CTTTG (SEQ ID NO: 1688) | |
| 1689 | GATGCAGAAGCTTTCTGTATGGGATCAGGCTTCC | RTT |
| | ACTTTG (SEQ ID NO: 1689) | |
| 24 | AAGATGGCTCAAGATTCAGT (SEQ ID NO: 24) | PE3 ngRNA spacer (AG PAM) |
| 25 | AAGATTCAGTAGATCTTTCT (SEQ ID NO: 25) | PE3 ngRNA spacer (TG PAM) |
| 26 | AAGCTTTCTGTATGGGATCA (SEQ ID NO: 26) | PE3b ngRNA spacer (GG PAM) |
| 27 | AGATCTTTCTTGTGATTATC (SEQ ID NO: 27) | PE3 ngRNA spacer (AG PAM) |
| 28 | ATGGGATCAGGCTTCCACTT (SEQ ID NO: 28) | PE3b ngRNA spacer (TG PAM) |
| 1108 | CAGTGCTGGACAGGCTGCTG (SEQ ID NO: 1108) | PE3 ngRNA spacer (TG PAM) |
| 29 | CCTTTTCGCTTTTTCCAAGA (SEQ ID NO: 29) | PE3 ngRNA spacer (TG PAM) |
| 1110 | CTGGACAGGCTGCTGTGAAG (SEQ ID NO: 1110) | PE3 ngRNA spacer (GG PAM) |
| 30 | CTTTTCGCTTTTTCCAAGAT (SEQ ID NO: 30) | PE3 ngRNA spacer (GG PAM) |
| 31 | GAAGCTTTCTGTATGGGATC (SEQ ID NO: 31) | PE3b ngRNA spacer (AG PAM) |
| 32 | GATGCAGAAGCTTTCTGTAT (SEQ ID NO: 32) | PE3 ngRNA spacer (GG PAM) |
| 33 | GATTCAGTAGATCTTTCTTG (SEQ ID NO: 33) | PE3 ngRNA spacer (TG PAM) |
| 1111 | GCTGGACAGGCTGCTGTGAA (SEQ ID NO: 1111) | PE3 ngRNA spacer (GG PAM) |
| 34 | GCTTTTTCCAAGATGGCTCA (SEQ ID NO: 34) | PE3 ngRNA spacer (AG PAM) |
| 35 | GGATGCAGAAGCTTTCTGTA (SEQ ID NO: 35) | PE3 ngRNA spacer (TG PAM) |
| 37 | GTGAAGGGACATCACCTTTT (SEQ ID NO: 37) | PE3 ngRNA spacer (CG PAM) |
| 38 | TCACCTTTTCGCTTTTTCCA (SEQ ID NO: 38) | PE3 ngRNA spacer (AG PAM) |
| 39 | TCCAAGATGGCTCAAGATTC (SEQ ID NO: 39) | PE3 ngRNA spacer (AG PAM) |
| 41 | TGATTATCAGTTTTGGATGC (SEQ ID NO: 41) | PE3 ngRNA spacer (AG PAM) |
| 1113 | TGCTGGACAGGCTGCTGTGA (SEQ ID NO: 1113) | PE3 ngRNA spacer (AG PAM) |
| 43 | TGGGATCAGGCTTCCACTTT (SEQ ID NO: 43) | PE3b ngRNA spacer (GG PAM) |
| 44 | TTATCAGTTTTGGATGCAGA (SEQ ID NO: 44) | PE3 ngRNA spacer (AG PAM) |
| 1114 | TTCAGTGCTGGACAGGCTGC (SEQ ID NO: 1114) | PE3 ngRNA spacer (TG PAM) |
| 45 | TTCTTGTGATTATCAGTTTT (SEQ ID NO: 45) | PE3 ngRNA spacer (GG PAM) |
| 46 | TTGTGATTATCAGTTTTGGA (SEQ ID NO: 46) | PE3 ngRNA spacer (TG PAM) |
| 47 | TTTCTTGTGATTATCAGTTT (SEQ ID NO: 47) | PE3 ngRNA spacer (TG PAM) |
| 48 | TTTTGGATGCAGAAGCTTTC (SEQ ID NO: 48) | PE3 ngRNA spacer (TG PAM) |
| 49 | TTTCTTGTGATTATCAGTTTGTTTTAGAGCTAGAA | PE3 ngRNA (TG PAM) |
| | ATAGCAAGTTAAAATAAGGCTAGTCCGTTATCAA | |
| | CTTGAAAAAGTGGCACCGAGTCGGTGC (SEQ ID | |
| | NO: 49) | |
| 50 | GGATGCAGAAGCTTTCTGTAGTTTTAGAGCTAGA | PE3 ngRNA (TG PAM) |
| | AATAGCAAGTTAAAATAAGGCTAGTCCGTTATCA | |
| | ACTTGAAAAAGTGGCACCGAGTCGGTGC (SEQ ID | |
| | NO: 50) | |
| 51 | GAAGCTTTCTGTATGGGATCGTTTTAGAGCTAGA | PE3b ngRNA (AG PAM) |
| | AATAGCAAGTTAAAATAAGGCTAGTCCGTTATCA | |
| | ACTTGAAAAAGTGGCACCGAGTCGGTGC (SEQ ID | |
| | NO: 51) | |
| 52 | ATGGGATCAGGCTTCCACTTGTTTTAGAGCTAGA | PE3b ngRNA (TG PAM) |
| | AATAGCAAGTTAAAATAAGGCTAGTCCGTTATCA | |
| | ACTTGAAAAAGTGGCACCGAGTCGGTGC (SEQ ID | |
| | NO: 52) | |
| 53 | GGATGCAGAAGCTTTCTGTAGTTTTAGAGCTAGA | PE3 ngRNA (TG PAM), contains end |
| | AATAGCAAGTTAAAATAAGGCTAGTCCGTTATCA | adaptations |
| | ACTTGAAAAAGTGGCACCGAGTCGGTGCTTTT | |
| | (SEQ ID NO: 53) | |
| 54 | GAAGCTTTCTGTATGGGATCGTTTTAGAGCTAGA | PE3b ngRNA (AG PAM), contains end |
| | AATAGCAAGTTAAAATAAGGCTAGTCCGTTATCA | adaptations |
| | ACTTGAAAAAGTGGCACCGAGTCGGTGCTTTT | |
| | (SEQ ID NO: 54) | |
| 55 | GTTTCTTGTGATTATCAGTTTGTTTTAGAGCTAGA | PE3 ngRNA (TG PAM), contains end |
| | AATAGCAAGTTAAAATAAGGCTAGTCCGTTATCA | adaptations |
| | ACTTGAAAAAGTGGCACCGAGTCGGTGCTTTT | |
| | (SEQ ID NO: 55) | |
| 56 | GATGGGATCAGGCTTCCACTTGTTTTAGAGCTAG | PE3b ngRNA (TG PAM), contains end |
| | AAATAGCAAGTTAAAATAAGGCTAGTCCGTTATC | adaptations |
| | AACTTGAAAAAGTGGCACCGAGTCGGTGCTTTT | |
| | (SEQ ID NO: 56) | |
| 57 | GGATGCAGAAGCTTTCTGTAGTTTTAGAGCTAGA | PE3 ngRNA (TG PAM), contains linker |
| | AATAGCAAGTTAAAATAAGGCTAGTCCGTTATCA | sequence AACATTGA; hairpin SEQ ID |
| | ACTTGAAAAAGTGGCACCGAGTCGGTGCAACAT | NO: 3591; end adaptations |
| | TGACGCGTCTCTACGTGGGGGCGCGTTTT (SEQ | |
| | ID NO: 57) | |
| 58 | GAAGCTTTCTGTATGGGATCGTTTTAGAGCTAGA | PE3b ngRNA (AG PAM), contains linker |
| | AATAGCAAGTTAAAATAAGGCTAGTCCGTTATCA | sequence AACATTGA; hairpin SEQ ID |
| | ACTTGAAAAAGTGGCACCGAGTCGGTGCAACAT | NO: 3591; end adaptations |
| | TGACGCGTCTCTACGTGGGGGCGCGTTTT (SEQ | |
| | ID NO: 58) | |
| 59 | GTTTCTTGTGATTATCAGTTTGTTTTAGAGCTAGA | PE3 ngRNA (TG PAM), contains linker |
| | AATAGCAAGTTAAAATAAGGCTAGTCCGTTATCA | sequence AACATTGA; hairpin SEQ ID |
| | ACTTGAAAAAGTGGCACCGAGTCGGTGCAACAT | NO: 3591; end adaptations |
| | TGACGCGTCTCTACGTGGGGGCGCGTTTT (SEQ | |
| | ID NO: 59) | |
| 60 | GATGGGATCAGGCTTCCACTTGTTTTAGAGCTAG | PE3b ngRNA (TG PAM), contains linker |
| | AAATAGCAAGTTAAAATAAGGCTAGTCCGTTATC | sequence AACATTGA; hairpin SEQ ID |
| | AACTTGAAAAAGTGGCACCGAGTCGGTGCAACA | NO: 3591; end adaptations |
| | TTGACGCGTCTCTACGTGGGGGCGCGTTTT (SEQ | |
| | ID NO: 60) | |

TABLE 22

| Sequence | | |
|---|---|---|
| Number | Sequence | Description |
| 1690 | ATCTTTCTTGTGATTAT (SEQ ID NO: 1690) | PEgRNA spacer (CAG PAM) |
| 1691 | GATCTTTCTTGTGATTAT (SEQ ID NO: 1691) | PEgRNA spacer (CAG PAM) |
| 1692 | AGATCTTTCTTGTGATTAT (SEQ ID NO: 1692) | PEgRNA spacer (CAG PAM) |
| 1228 | TAGATCTTTCTTGTGATTAT (SEQ ID NO: 1228) | PEgRNA spacer (CAG PAM) |
| 1693 | GTAGATCTTTCTTGTGATTAT (SEQ ID NO: 1693) | PEgRNA spacer (CAG PAM) |
| 1694 | AGTAGATCTTTCTTGTGATTAT (SEQ ID NO: 1694) | PEgRNA spacer (CAG PAM) |
| 1695 | ATCAC | PBS |
| 1696 | ATCACA | PBS |
| 1697 | ATCACAA | PBS |
| 1698 | ATCACAAG | PBS |
| 1699 | ATCACAAGA | PBS |
| 1700 | ATCACAAGAA (SEQ ID NO: 1700) | PBS |
| 1701 | ATCACAAGAAA (SEQ ID NO: 1701) | PBS |
| 1702 | ATCACAAGAAAG (SEQ ID NO: 1702) | PBS |
| 1703 | ATCACAAGAAAGA (SEQ ID NO: 1703) | PBS |
| 1704 | ATCACAAGAAAGAT (SEQ ID NO: 1704) | PBS |
| 1705 | ATCACAAGAAAGATC (SEQ ID NO: 1705) | PBS |
| 1706 | ATCACAAGAAAGATCT (SEQ ID NO: 1706) | PBS |
| 1707 | ATCACAAGAAAGATCTA (SEQ ID NO: 1707) | PBS |
| 1708 | ATCACAAGAAAGATCTAC (SEQ ID NO: 1708) | PBS |
| 1709 | ATCACAAGAAAGATCTACT (SEQ ID NO: 1709) | PBS |
| 1710 | CCCATACAGAAAGCTTCTGCATCCAAAACTGATA | RTT |
| | (SEQ ID NO: 1710) | |
| 1711 | CCCATACAGAAAGCTTCTGCATCCAAAATTGATA | RTT (CAG-to-CAA PAM silencing edit) |
| | (SEQ ID NO: 1711) | |
| 1712 | TCCCATACAGAAAGCTTCTGCATCCAAAACTGAT | RTT |
| | A (SEQ ID NO: 1712) | |
| 1713 | TCCCATACAGAAAGCTTCTGCATCCAAAATTGAT | RTT (CAG-to-CAA PAM silencing edit) |
| | A (SEQ ID NO: 1713) | |
| 1714 | ATCCCATACAGAAAGCTTCTGCATCCAAAACTGA | RTT |
| | TA (SEQ ID NO: 1714) | |
| 1715 | ATCCCATACAGAAAGCTTCTGCATCCAAAATTGA | RTT (CAG-to-CAA PAM silencing edit) |
| | TA (SEQ ID NO: 1715) | |
| 1716 | GATCCCATACAGAAAGCTTCTGCATCCAAAACTG | RTT |
| | ATA (SEQ ID NO: 1716) | |
| 1717 | GATCCCATACAGAAAGCTTCTGCATCCAAAATTG | RTT (CAG-to-CAA PAM silencing edit) |
| | ATA (SEQ ID NO: 1717) | |
| 1718 | TGATCCCATACAGAAAGCTTCTGCATCCAAAACT | RTT |
| | GATA (SEQ ID NO: 1718) | |
| 1719 | TGATCCCATACAGAAAGCTTCTGCATCCAAAATT | RTT (CAG-to-CAA PAM silencing edit) |
| | GATA (SEQ ID NO: 1719) | |
| 1720 | CTGATCCCATACAGAAAGCTTCTGCATCCAAAAC | RTT |
| | TGATA (SEQ ID NO: 1720) | |
| 1721 | CTGATCCCATACAGAAAGCTTCTGCATCCAAAAT | RTT (CAG-to-CAA PAM silencing edit) |
| | TGATA (SEQ ID NO: 1721) | |
| 1722 | CCTGATCCCATACAGAAAGCTTCTGCATCCAAAA | RTT |
| | CTGATA (SEQ ID NO: 1722) | |
| 1723 | CCTGATCCCATACAGAAAGCTTCTGCATCCAAAA | RTT (CAG-to-CAA PAM silencing edit) |
| | TTGATA (SEQ ID NO: 1723) | |
| 480 | AAGGCTTCATACATCTTCCT (SEQ ID NO: 480) | PE3 ngRNA spacer (TAG PAM) |
| 481 | AGTGGAAGCCTGATCCCATA (SEQ ID NO: 481) | PE3b ngRNA spacer (CAG PAM) |
| 483 | CCTTAGGAACTCCTGGAACT (SEQ ID NO: 483) | PE3 ngRNA spacer (GAG PAM) |
| 484 | GAAGCCTGATCCCATACAGA (SEQ ID NO: 484) | PE3b ngRNA spacer (AAG PAM) |
| 485 | GGAACTGAGCCACGTGAAGA (SEQ ID NO: 485) | PE3 ngRNA spacer (CAG PAM) |
| 486 | GGTGTCTTGCTGGGTTTCCA (SEQ ID NO: 486) | PE3 ngRNA spacer (AAG PAM) |
| 487 | TCCTGGAACTGAGCCACGTG (SEQ ID NO: 487) | PE3 ngRNA spacer (AAG PAM) |
| 488 | TTGCTGGGTTTCCAAAGTGG (SEQ ID NO: 488) | PE3 ngRNA spacer (AAG PAM) |

TABLE 23

| Sequence | | |
|---|---|---|
| Number | Sequence | Description |
| 1724 | TGCTGGGTTTCCAAAGT (SEQ ID NO: 1724) | PEgRNA spacer (GG; GGA PAM) |
| 1725 | TTGCTGGGTTTCCAAAGT (SEQ ID NO: 1725) | PEgRNA spacer (GG; GGA PAM) |
| 1726 | CTTGCTGGGTTTCCAAAGT (SEQ ID NO: 1726) | PEgRNA spacer (GG; GGA PAM) |
| 216 | TCTTGCTGGGTTTCCAAAGT (SEQ ID NO: 216) | PEgRNA spacer (GG; GGA PAM) |
| 1727 | GTCTTGCTGGGTTTCCAAAGT (SEQ ID NO: 1727) | PEgRNA spacer (GG; GGA PAM) |
| 1728 | TGTCTTGCTGGGTTTCCAAAGT (SEQ ID NO: 1728) | PEgRNA spacer (GG; GGA PAM) |
| 1729 | TTGGA | PBS |
| 1730 | TTGGAA | PBS |
| 1731 | TTGGAAA | PBS |
| 1732 | TTGGAAAC | PBS |
| 1733 | TTGGAAACC | PBS |
| 1734 | TTGGAAACCC (SEQ ID NO: 1734) | PBS |
| 1735 | TTGGAAACCCA (SEQ ID NO: 1735) | PBS |
| 1736 | TTGGAAACCCAG (SEQ ID NO: 1736) | PBS |
| 1737 | TTGGAAACCCAGC (SEQ ID NO: 1737) | PBS |
| 1738 | TTGGAAACCCAGCA (SEQ ID NO: 1738) | PBS |
| 1739 | TTGGAAACCCAGCAA (SEQ ID NO: 1739) | PBS |
| 1740 | TTGGAAACCCAGCAAG (SEQ ID NO: 1740) | PBS |
| 1741 | TTGGAAACCCAGCAAGA (SEQ ID NO: 1741) | PBS |
| 1742 | TTGGAAACCCAGCAAGAC (SEQ ID NO: 1742) | PBS |
| 1743 | TTGGAAACCCAGCAAGACA (SEQ ID NO: 1743) | PBS |
| 1744 | GATCAGGCTAGCACT (SEQ ID NO: 1744) | RTT*1, 2, 5, 6 (GG-to-GC; GGA-to-GCT PAM |
| | | silencing edit) |
| 1745 | GATCAGGCTAGTACT (SEQ ID NO: 1745) | RTT*1, 3, 5, 7 (GG-to-AC; GGA-to-ACT PAM |
| | | silencing edit) |
| 1746 | GATCAGGCTTCCACT (SEQ ID NO: 1746) | RTT*1, 4, 5, 8 |
| 1747 | GGATCAGGCTAGCACT (SEQ ID NO: 1747) | RTT*1, 2, 5, 6 (GG-to-GC; GGA-to-GCT PAM |
| | | silencing edit) |
| 1748 | GGATCAGGCTAGTACT (SEQ ID NO: 1748) | RTT*1, 3, 5, 7 (GG-to-AC; GGA-to-ACT PAM |
| | | silencing edit) |
| 1749 | GGATCAGGCTTCCACT (SEQ ID NO: 1749) | RTT*1, 4, 5, 8 |
| 1750 | GGGATCAGGCTAGCACT (SEQ ID NO: 1750) | RTT*1, 2, 5, 6 (GG-to-GC; GGA-to-GCT PAM |
| | | silencing edit) |
| 1751 | GGGATCAGGCTAGTACT (SEQ ID NO: 1751) | RTT*1, 3, 5, 7 (GG-to-AC; GGA-to-ACT PAM |
| | | silencing edit) |
| 1752 | GGGATCAGGCTTCCACT (SEQ ID NO: 1752) | RTT*1, 4, 5, 8 |
| 1753 | TGGGATCAGGCTAGCACT (SEQ ID NO: 1753) | RTT*1, 2, 5, 6 (GG-to-GC; GGA-to-GCT PAM |
| | | silencing edit) |
| 1754 | TGGGATCAGGCTAGTACT (SEQ ID NO: 1754) | RTT*1, 3, 5, 7 (GG-to-AC; GGA-to-ACT PAM |
| | | silencing edit) |
| 1755 | TGGGATCAGGCTTCCACT (SEQ ID NO: 1755) | RTT*1, 4, 5, 8 |
| 1756 | ATGGGATCAGGCTAGCACT (SEQ ID NO: 1756) | RTT*1, 2, 5, 6 (GG-to-GC; GGA-to-GCT PAM |
| | | silencing edit) |
| 1757 | ATGGGATCAGGCTAGTACT (SEQ ID NO: 1757) | RTT*1, 3, 5, 7 (GG-to-AC; GGA-to-ACT PAM |
| | | silencing edit) |
| 1758 | ATGGGATCAGGCTTCCACT (SEQ ID NO: 1758) | RTT*1, 4, 5, 8 |
| 1759 | TATGGGATCAGGCTAGCACT (SEQ ID NO: 1759) | RTT*1, 2, 5, 6 (GG-to-GC; GGA-to-GCT PAM |
| | | silencing edit) |
| 1760 | TATGGGATCAGGCTAGTACT (SEQ ID NO: 1760) | RTT*1, 3, 5, 7 (GG-to-AC; GGA-to-ACT PAM |
| | | silencing edit) |
| 132 | TATGGGATCAGGCTTCCACT (SEQ ID NO: 132) | RTT*1, 4, 5, 8 |
| 1761 | GTATGGGATCAGGCTAGCACT (SEQ ID NO: 1761) | RTT*1, 2, 5, 6 (GG-to-GC; GGA-to-GCT PAM |
| | | silencing edit) |
| 1762 | GTATGGGATCAGGCTAGTACT (SEQ ID NO: 1762) | RTT*1, 3, 5, 7 (GG-to-AC; GGA-to-ACT PAM |
| | | silencing edit) |
| 1763 | GTATGGGATCAGGCTTCCACT (SEQ ID NO: 1763) | RTT*1, 4, 5, 8 |
| 1764 | TGTATGGGATCAGGCTAGCACT (SEQ ID NO: | RTT*1, 2, 5, 6 (GG-to-GC; GGA-to-GCT PAM |
| | 1764) | silencing edit) |
| 1765 | TGTATGGGATCAGGCTAGTACT (SEQ ID NO: 1765) | RTT*1, 3, 5, 7 (GG-to-AC; GGA-to-ACT PAM |
| | | silencing edit) |
| 1766 | TGTATGGGATCAGGCTTCCACT (SEQ ID NO: 1766) | RTT*1, 4, 5, 8 |
| 1767 | CTGTATGGGATCAGGCTAGCACT (SEQ ID NO: | RTT*1, 2, 5, 6 (GG-to-GC; GGA-to-GCT PAM |
| | 1767) | silencing edit) |
| 1768 | CTGTATGGGATCAGGCTAGTACT (SEQ ID NO: | RTT*1, 3, 5, 7 (GG-to-AC; GGA-to-ACT PAM |
| | 1768) | silencing edit) |
| 1769 | CTGTATGGGATCAGGCTTCCACT (SEQ ID NO: | RTT*1, 4, 5, 8 |
| | 1769) | |
| 1770 | TCTGTATGGGATCAGGCTAGCACT (SEQ ID NO: | RTT*1, 2, 5, 6 (GG-to-GC; GGA-to-GCT PAM |
| | 1770) | silencing edit) |
| 1771 | TCTGTATGGGATCAGGCTAGTACT (SEQ ID NO: | RTT*1, 3, 5, 7 (GG-to-AC; GGA-to-ACT PAM |
| | 1771) | silencing edit) |
| 1772 | TCTGTATGGGATCAGGCTTCCACT (SEQ ID NO: | RTT*1, 4, 5, 8 |
| | 1772) | |
| 1773 | TTCTGTATGGGATCAGGCTAGCACT (SEQ ID NO: | RTT*1, 2, 5, 6 (GG-to-GC; GGA-to-GCT PAM |
| | 1773) | silencing edit) |
| 1774 | TTCTGTATGGGATCAGGCTAGTACT (SEQ ID NO: | RTT*1, 3, 5, 7 (GG-to-AC; GGA-to-ACT PAM |
| | 1774) | silencing edit) |
| 1775 | TTCTGTATGGGATCAGGCTTCCACT (SEQ ID NO: | RTT*1, 4, 5, 8 |
| | 1775) | |
| 1776 | TTTCTGTATGGGATCAGGCTAGCACT (SEQ ID NO: | RTT*1, 2, 5, 6 (GG-to-GC; GGA-to-GCT PAM |
| | 1776) | silencing edit) |
| 1777 | TTTCTGTATGGGATCAGGCTAGTACT (SEQ ID NO: | RTT*1, 3, 5, 7 (GG-to-AC; GGA-to-ACT PAM |
| | 1777) | silencing edit) |
| 1778 | TTTCTGTATGGGATCAGGCTTCCACT (SEQ ID NO: | RTT*1, 4, 5, 8 |
| | 1778) | |
| 1779 | CTTTCTGTATGGGATCAGGCTAGCACT (SEQ ID | RTT*1, 2, 5, 6 (GG-to-GC; GGA-to-GCT PAM |
| | NO: 1779) | silencing edit) |
| 1780 | CTTTCTGTATGGGATCAGGCTAGTACT (SEQ ID | RTT*1, 3, 5, 7 (GG-to-AC; GGA-to-ACT PAM |
| | NO: 1780) | silencing edit) |
| 1781 | CTTTCTGTATGGGATCAGGCTTCCACT (SEQ ID | RTT*1, 4, 5, 8 |
| | NO: 1781) | |
| 1782 | GCTTTCTGTATGGGATCAGGCTAGCACT (SEQ ID | RTT*1, 2, 5, 6 (GG-to-GC; GGA-to-GCT PAM |
| | NO: 1782) | silencing edit) |
| 1783 | GCTTTCTGTATGGGATCAGGCTAGTACT (SEQ ID | RTT*1, 3, 5, 7 (GG-to-AC; GGA-to-ACT PAM |
| | NO: 1783) | silencing edit) |
| 1784 | GCTTTCTGTATGGGATCAGGCTTCCACT (SEQ ID | RTT*1, 4, 5, 8 |
| | NO: 1784) | |
| 1785 | AGCTTTCTGTATGGGATCAGGCTAGCACT (SEQ | RTT*1, 2, 5, 6 (GG-to-GC; GGA-to-GCT PAM |
| | ID NO: 1785) | silencing edit) |
| 1786 | AGCTTTCTGTATGGGATCAGGCTAGTACT (SEQ | RTT*1, 3, 5, 7 (GG-to-AC; GGA-to-ACT PAM |
| | ID NO: 1786) | silencing edit) |
| 1787 | AGCTTTCTGTATGGGATCAGGCTTCCACT (SEQ ID | RTT*1, 4, 5, 8 |
| | NO: 1787) | |
| 1788 | AAGCTTTCTGTATGGGATCAGGCTAGCACT (SEQ | RTT*1, 2, 5, 6 (GG-to-GC; GGA-to-GCT PAM |
| | ID NO: 1788) | silencing edit) |
| 1789 | AAGCTTTCTGTATGGGATCAGGCTAGTACT (SEQ | RTT*1, 3, 5, 7 (GG-to-AC; GGA-to-ACT PAM |
| | ID NO: 1789) | silencing edit) |
| 1790 | AAGCTTTCTGTATGGGATCAGGCTTCCACT (SEQ | RTT*1, 4, 5, 8 |
| | ID NO: 1790) | |
| 1791 | GAAGCTTTCTGTATGGGATCAGGCTAGCACT | RTT*1, 2, 5, 6 (GG-to-GC; GGA-to-GCT PAM |
| | (SEQ ID NO: 1791) | silencing edit) |
| 1792 | GAAGCTTTCTGTATGGGATCAGGCTAGTACT | RTT*1, 3, 5, 7 (GG-to-AC; GGA-to-ACT PAM |
| | (SEQ ID NO: 1792) | silencing edit) |
| 1793 | GAAGCTTTCTGTATGGGATCAGGCTTCCACT | RTT*1, 4, 5, 8 |
| | (SEQ ID NO: 1793) | |
| 1794 | AGAAGCTTTCTGTATGGGATCAGGCTAGCACT | RTT*1, 2, 5, 6 (GG-to-GC; GGA-to-GCT PAM |
| | (SEQ ID NO: 1794) | silencing edit) |
| 1795 | AGAAGCTTTCTGTATGGGATCAGGCTAGTACT | RTT*1, 3, 5, 7 (GG-to-AC; GGA-to-ACT PAM |
| | (SEQ ID NO: 1795) | silencing edit) |
| 1796 | AGAAGCTTTCTGTATGGGATCAGGCTTCCACT | RTT*1, 4, 5, 8 |
| | (SEQ ID NO: 1796) | |
| 1797 | CAGAAGCTTTCTGTATGGGATCAGGCTAGCACT | RTT*1, 2, 5, 6 (GG-to-GC; GGA-to-GCT PAM |
| | (SEQ ID NO: 1797) | silencing edit) |
| 1798 | CAGAAGCTTTCTGTATGGGATCAGGCTAGTACT | RTT*1, 3, 5, 7 (GG-to-AC; GGA-to-ACT PAM |
| | (SEQ ID NO: 1798) | silencing edit) |
| 1799 | CAGAAGCTTTCTGTATGGGATCAGGCTTCCACT | RTT*1, 4, 5, 8 |
| | (SEQ ID NO: 1799) | |
| 1800 | GCAGAAGCTTTCTGTATGGGATCAGGCTAGCACT | RTT*1, 2, 5, 6 (GG-to-GC; GGA-to-GCT PAM |
| | (SEQ ID NO: 1800) | silencing edit) |
| 1801 | GCAGAAGCTTTCTGTATGGGATCAGGCTAGTACT | RTT*1, 3, 5, 7 (GG-to-AC; GGA-to-ACT PAM |
| | (SEQ ID NO: 1801) | silencing edit) |
| 1802 | GCAGAAGCTTTCTGTATGGGATCAGGCTTCCACT | RTT*1, 4, 5, 8 |
| | (SEQ ID NO: 1802) | |
| 1803 | TGCAGAAGCTTTCTGTATGGGATCAGGCTAGCAC | RTT*1, 2, 5, 6 (GG-to-GC; GGA-to-GCT PAM |
| | T (SEQ ID NO: 1803) | silencing edit) |
| 1804 | TGCAGAAGCTTTCTGTATGGGATCAGGCTAGTAC | RTT*1, 3, 5, 7 (GG-to-AC; GGA-to-ACT PAM |
| | T (SEQ ID NO: 1804) | silencing edit) |
| 1805 | TGCAGAAGCTTTCTGTATGGGATCAGGCTTCCAC | RTT*1, 4, 5, 8 |
| | T (SEQ ID NO: 1805) | |
| 1806 | ATGCAGAAGCTTTCTGTATGGGATCAGGCTAGCA | RTT*1, 2, 5, 6 (GG-to-GC; GGA-to-GCT PAM |
| | CT (SEQ ID NO: 1806) | silencing edit) |
| 1807 | ATGCAGAAGCTTTCTGTATGGGATCAGGCTAGTA | RTT*1, 3, 5, 7 (GG-to-AC; GGA-to-ACT PAM |
| | CT (SEQ ID NO: 1807) | silencing edit) |
| 1808 | ATGCAGAAGCTTTCTGTATGGGATCAGGCTTCCA | RTT*1, 4, 5, 8 |
| | CT (SEQ ID NO: 1808) | |
| 1809 | GATGCAGAAGCTTTCTGTATGGGATCAGGCTAGC | RTT*1, 2, 5, 6 (GG-to-GC; GGA-to-GCT PAM |
| | ACT (SEQ ID NO: 1809) | silencing edit) |
| 1810 | GATGCAGAAGCTTTCTGTATGGGATCAGGCTAGT | RTT*1, 3, 5, 7 (GG-to-AC; GGA-to-ACT PAM |
| | ACT (SEQ ID NO: 1810) | silencing edit) |
| 1811 | GATGCAGAAGCTTTCTGTATGGGATCAGGCTTCC | RTT*1, 4, 5, 8 |
| | ACT (SEQ ID NO: 1811) | |
| 1812 | GGATGCAGAAGCTTTCTGTATGGGATCAGGCTAG | RTT*1, 2, 5, 6 (GG-to-GC; GGA-to-GCT PAM |
| | CACT (SEQ ID NO: 1812) | silencing edit) |
| 1813 | GGATGCAGAAGCTTTCTGTATGGGATCAGGCTAG | RTT*1, 3, 5, 7 (GG-to-AC; GGA-to-ACT PAM |
| | TACT (SEQ ID NO: 1813) | silencing edit) |
| 1814 | GGATGCAGAAGCTTTCTGTATGGGATCAGGCTTC | RTT*1, 4, 5, 8 |
| | CACT (SEQ ID NO: 1814) | |
| 1815 | TGGATGCAGAAGCTTTCTGTATGGGATCAGGCTA | RTT*1, 2, 5, 6 (GG-to-GC; GGA-to-GCT PAM |
| | GCACT (SEQ ID NO: 1815) | silencing edit) |
| 1816 | TGGATGCAGAAGCTTTCTGTATGGGATCAGGCTA | RTT*1, 3, 5, 7 (GG-to-AC; GGA-to-ACT PAM |
| | GTACT (SEQ ID NO: 1816) | silencing edit) |
| 1817 | TGGATGCAGAAGCTTTCTGTATGGGATCAGGCTT | RTT*1, 4, 5, 8 |
| | CCACT (SEQ ID NO: 1817) | |
| 1818 | TTGGATGCAGAAGCTTTCTGTATGGGATCAGGCT | RTT*1, 2, 5, 6 (GG-to-GC; GGA-to-GCT PAM |
| | AGCACT (SEQ ID NO: 1818) | silencing edit) |
| 1819 | TTGGATGCAGAAGCTTTCTGTATGGGATCAGGCT | RTT*1, 3, 5, 7 (GG-to-AC; GGA-to-ACT PAM |
| | AGTACT (SEQ ID NO: 1819) | silencing edit) |
| 1820 | TTGGATGCAGAAGCTTTCTGTATGGGATCAGGCT | RTT*1, 4, 5, 8 |
| | TCCACT (SEQ ID NO: 1820) | |
| 24 | AAGATGGCTCAAGATTCAGT (SEQ ID NO: 24) | PE3 ngRNA spacer (AG;AGA PAM) |
| 25 | AAGATTCAGTAGATCTTTCT (SEQ ID NO: 25) | PE3 ngRNA spacer (TG PAM) |
| 26 | AAGCTTTCTGTATGGGATCA (SEQ ID NO: 26) | PE3b*1 ngRNA spacer (GG PAM) |
| 27 | AGATCTTTCTTGTGATTATC (SEQ ID NO: 27) | PE3 ngRNA spacer (AG PAM) |
| 1274 | ATGGGATCAGGCTAGCACTT (SEQ ID NO: 1274) | PE3b*2 ngRNA spacer (TG PAM) |
| 1275 | ATGGGATCAGGCTAGTACTT (SEQ ID NO: 1275) | PE3b*3 ngRNA spacer (TG PAM) |
| 28 | ATGGGATCAGGCTTCCACTT (SEQ ID NO: 28) | PE3b*4 ngRNA spacer (TG PAM) |
| 1108 | CAGTGCTGGACAGGCTGCTG (SEQ ID NO: 1108) | PE3 ngRNA spacer (TG;TGA PAM) |
| 29 | CCTTTTCGCTTTTTCCAAGA (SEQ ID NO: 29) | PE3 ngRNA spacer (TG PAM) |
| 1110 | CTGGACAGGCTGCTGTGAAG (SEQ ID NO: 1110) | PE3 ngRNA spacer (GG;GGA PAM) |
| 30 | CTTTTCGCTTTTTCCAAGAT (SEQ ID NO: 30) | PE3 ngRNA spacer (GG PAM) |
| 31 | GAAGCTTTCTGTATGGGATC (SEQ ID NO: 31) | PE3b*5 ngRNA spacer (AG PAM) |
| 32 | GATGCAGAAGCTTTCTGTAT (SEQ ID NO: 32) | PE3 ngRNA spacer (GG;GGA PAM) |
| 33 | GATTCAGTAGATCTTTCTTG (SEQ ID NO: 33) | PE3 ngRNA spacer (TG;TGA PAM) |
| 1111 | GCTGGACAGGCTGCTGTGAA (SEQ ID NO: 1111) | PE3 ngRNA spacer (GG PAM) |
| 34 | GCTTTTTCCAAGATGGCTCA (SEQ ID NO: 34) | PE3 ngRNA spacer (AG;AGA PAM) |
| 35 | GGATGCAGAAGCTTTCTGTA (SEQ ID NO: 35) | PE3 ngRNA spacer (TG PAM) |
| 37 | GTGAAGGGACATCACCTTTT (SEQ ID NO: 37) | PE3 ngRNA spacer (CG PAM) |
| 38 | TCACCTTTTCGCTTTTTCCA (SEQ ID NO: 38) | PE3 ngRNA spacer (AG;AGA PAM) |
| 39 | TCCAAGATGGCTCAAGATTC (SEQ ID NO: 39) | PE3 ngRNA spacer (AG PAM) |
| 1112 | TCCTTCAGTGCTGGACAGGC (SEQ ID NO: 1112) | PE3 ngRNA spacer (TG PAM) |
| 41 | TGATTATCAGTTTTGGATGC (SEQ ID NO: 41) | PE3 ngRNA spacer (AG;AGA PAM) |
| 1113 | TGCTGGACAGGCTGCTGTGA (SEQ ID NO: 1113) | PE3 ngRNA spacer (AG PAM) |
| 1821 | TGGGATCAGGCTAGCACTTT (SEQ ID NO: 1821) | PE3b*6 ngRNA spacer (GG;GGA PAM) |
| 1399 | TGGGATCAGGCTAGTACTTT (SEQ ID NO: 1399) | PE3b*7 ngRNA spacer (GG;GGA PAM) |
| 43 | TGGGATCAGGCTTCCACTTT (SEQ ID NO: 43) | PE3b*8 ngRNA spacer (GG;GGA PAM) |
| 44 | TTATCAGTTTTGGATGCAGA (SEQ ID NO: 44) | PE3 ngRNA spacer (AG PAM) |
| 1114 | TTCAGTGCTGGACAGGCTGC (SEQ ID NO: 1114) | PE3 ngRNA spacer (TG PAM) |
| 45 | TTCTTGTGATTATCAGTTTT (SEQ ID NO: 45) | PE3 ngRNA spacer (GG;GGA PAM) |
| 46 | TTGTGATTATCAGTTTTGGA (SEQ ID NO: 46) | PE3 ngRNA spacer (TG PAM) |
| 47 | TTTCTTGTGATTATCAGTTT (SEQ ID NO: 47) | PE3 ngRNA spacer (TG PAM) |
| 48 | TTTTGGATGCAGAAGCTTTC (SEQ ID NO: 48) | PE3 ngRNA spacer (TG PAM) |
| 49 | TTTCTTGTGATTATCAGTTTGTTTTAGAGCTAGAA | PE3 ngRNA (TG PAM) |
| | ATAGCAAGTTAAAATAAGGCTAGTCCGTTATCAA | |
| | CTTGAAAAAGTGGCACCGAGTCGGTGC (SEQ ID | |
| | NO: 49) | |
| 50 | GGATGCAGAAGCTTTCTGTAGTTTTAGAGCTAGA | PE3 ngRNA (TG PAM) |
| | AATAGCAAGTTAAAATAAGGCTAGTCCGTTATCA | |
| | ACTTGAAAAAGTGGCACCGAGTCGGTGC (SEQ ID | |
| | NO: 50) | |
| 51 | GAAGCTTTCTGTATGGGATCGTTTTAGAGCTAGA | PE3b*5 ngRNA (AG PAM) |
| | AATAGCAAGTTAAAATAAGGCTAGTCCGTTATCA | |
| | ACTTGAAAAAGTGGCACCGAGTCGGTGC (SEQ ID | |
| | NO: 51) | |
| 52 | ATGGGATCAGGCTTCCACTTGTTTTAGAGCTAGA | PE3b*4 ngRNA (TG PAM) |
| | AATAGCAAGTTAAAATAAGGCTAGTCCGTTATCA | |
| | ACTTGAAAAAGTGGCACCGAGTCGGTGC (SEQ ID | |
| | NO: 52) | |
| 53 | GGATGCAGAAGCTTTCTGTAGTTTTAGAGCTAGA | PE3 ngRNA (TG PAM), contains 3′ TTTT |
| | AATAGCAAGTTAAAATAAGGCTAGTCCGTTATCA | |
| | ACTTGAAAAAGTGGCACCGAGTCGGTGCTTTT | |
| | (SEQ ID NO: 53) | |
| 54 | GAAGCTTTCTGTATGGGATCGTTTTAGAGCTAGA | PE3b*5 ngRNA (AG PAM), contains 3′ TTTT |
| | AATAGCAAGTTAAAATAAGGCTAGTCCGTTATCA | |
| | ACTTGAAAAAGTGGCACCGAGTCGGTGCTTTT | |
| | (SEQ ID NO: 54) | |
| 55 | GTTTCTTGTGATTATCAGTTTGTTTTAGAGCTAGA | PE3 ngRNA (TG PAM), contains 3′ TTTT |
| | AATAGCAAGTTAAAATAAGGCTAGTCCGTTATCA | |
| | ACTTGAAAAAGTGGCACCGAGTCGGTGCTTTT | |
| | (SEQ ID NO: 55) | |
| 56 | GATGGGATCAGGCTTCCACTTGTTTTAGAGCTAG | PE3b*4 ngRNA (TG PAM), contains 3′ TTTT |
| | AAATAGCAAGTTAAAATAAGGCTAGTCCGTTATC | |
| | AACTTGAAAAAGTGGCACCGAGTCGGTGCTTTT | |
| | (SEQ ID NO: 56) | |
| 57 | GGATGCAGAAGCTTTCTGTAGTTTTAGAGCTAGA | PE3 ngRNA (TG PAM), contains linker |
| | AATAGCAAGTTAAAATAAGGCTAGTCCGTTATCA | sequence AACATTGA; hairpin SEQ ID |
| | ACTTGAAAAAGTGGCACCGAGTCGGTGCAACAT | NO: 3591; 3′ TTTT |
| | TGACGCGTCTCTACGTGGGGGCGCGTTTT (SEQ | |
| | ID NO: 57) | |
| 58 | GAAGCTTTCTGTATGGGATCGTTTTAGAGCTAGA | PE3b*5 ngRNA (AG PAM), contains linker |
| | AATAGCAAGTTAAAATAAGGCTAGTCCGTTATCA | sequence AACATTGA; hairpin SEQ ID |
| | ACTTGAAAAAGTGGCACCGAGTCGGTGCAACAT | NO: 3591; 3′ TTTT |
| | TGACGCGTCTCTACGTGGGGGCGCGTTTT (SEQ | |
| | ID NO: 58) | |
| 59 | GTTTCTTGTGATTATCAGTTTGTTTTAGAGCTAGA | PE3 ngRNA (TG PAM), contains linker |
| | AATAGCAAGTTAAAATAAGGCTAGTCCGTTATCA | sequence AACATTGA; hairpin SEQ ID |
| | ACTTGAAAAAGTGGCACCGAGTCGGTGCAACAT | NO: 3591; 3′ TTTT |
| | TGACGCGTCTCTACGTGGGGGCGCGTTTT (SEQ | |
| | ID NO: 59) | |
| 60 | GATGGGATCAGGCTTCCACTTGTTTTAGAGCTAG | PE3b*4 ngRNA (TG PAM), contains linker |
| | AAATAGCAAGTTAAAATAAGGCTAGTCCGTTATC | sequence AACATTGA; hairpin SEQ ID |
| | AACTTGAAAAAGTGGCACCGAGTCGGTGCAACA | NO: 3591; 3′ TTTT |
| | TTGACGCGTCTCTACGTGGGGGCGCGTTTT (SEQ | |
| | ID NO: 60) | |

TABLE 24

| Sequence | | |
|---|---|---|
| Number | Sequence | Description |
| 1822 | AGACAGGTGTCTTGCTG (SEQ ID NO: 1822) | PEgRNA spacer (GG PAM) |
| 1823 | AAGACAGGTGTCTTGCTG (SEQ ID NO: 1823) | PEgRNA spacer (GG PAM) |
| 1824 | GAAGACAGGTGTCTTGCTG (SEQ ID NO: 1824) | PEgRNA spacer (GG PAM) |
| 217 | TGAAGACAGGTGTCTTGCTG (SEQ ID NO: 217) | PEgRNA spacer (GG PAM) |
| 1825 | GTGAAGACAGGTGTCTTGCTG (SEQ ID NO: 1825) | PEgRNA spacer (GG PAM) |
| 1826 | CGTGAAGACAGGTGTCTTGCTG (SEQ ID NO: | PEgRNA spacer (GG PAM) |
| | 1826) | |
| 1827 | CAAGA | PBS |
| 1828 | CAAGAC | PBS |
| 1829 | CAAGACA | PBS |
| 1830 | CAAGACAC | PBS |
| 1831 | CAAGACACC | PBS |
| 1832 | CAAGACACCT (SEQ ID NO: 1832) | PBS |
| 1833 | CAAGACACCTG (SEQ ID NO: 1833) | PBS |
| 1834 | CAAGACACCTGT (SEQ ID NO: 1834) | PBS |
| 1835 | CAAGACACCTGTC (SEQ ID NO: 1835) | PBS |
| 1836 | CAAGACACCTGTCT (SEQ ID NO: 1836) | PBS |
| 1837 | CAAGACACCTGTCTT (SEQ ID NO: 1837) | PBS |
| 1838 | CAAGACACCTGTCTTC (SEQ ID NO: 1838) | PBS |
| 1839 | CAAGACACCTGTCTTCA (SEQ ID NO: 1839) | PBS |
| 1840 | CAAGACACCTGTCTTCAC (SEQ ID NO: 1840) | PBS |
| 1841 | CAAGACACCTGTCTTCACG (SEQ ID NO: 1841) | PBS |
| 1842 | GATCAGGCTTCCACTTTGGAAACCCAG (SEQ ID | RTT |
| | NO: 1842) | |
| 1843 | GGATCAGGCTTCCACTTTGGAAACCCAG (SEQ ID | RTT |
| | NO: 1843) | |
| 1844 | GGGATCAGGCTTCCACTTTGGAAACCCAG (SEQ | RTT |
| | ID NO: 1844) | |
| 1845 | TGGGATCAGGCTTCCACTTTGGAAACCCAG (SEQ | RTT |
| | ID NO: 1845) | |
| 1846 | ATGGGATCAGGCTTCCACTTTGGAAACCCAG | RTT |
| | (SEQ ID NO: 1846) | |
| 1847 | TATGGGATCAGGCTTCCACTTTGGAAACCCAG | RTT |
| | (SEQ ID NO: 1847) | |
| 1848 | GTATGGGATCAGGCTTCCACTTTGGAAACCCAG | RTT |
| | (SEQ ID NO: 1848) | |
| 1849 | TGTATGGGATCAGGCTTCCACTTTGGAAACCCAG | RTT |
| | (SEQ ID NO: 1849) | |
| 1850 | CTGTATGGGATCAGGCTTCCACTTTGGAAACCCA | RTT |
| | G (SEQ ID NO: 1850) | |
| 1851 | TCTGTATGGGATCAGGCTTCCACTTTGGAAACCC | RTT |
| | AG (SEQ ID NO: 1851) | |
| 1852 | TTCTGTATGGGATCAGGCTTCCACTTTGGAAACC | RTT |
| | CAG (SEQ ID NO: 1852) | |
| 1853 | TTTCTGTATGGGATCAGGCTTCCACTTTGGAAAC | RT |
| | CCAG (SEQ ID NO: 1853) | |
| 1854 | CTTTCTGTATGGGATCAGGCTTCCACTTTGGAAA | RTT |
| | CCCAG (SEQ ID NO: 1854) | |
| 1855 | GCTTTCTGTATGGGATCAGGCTTCCACTTTGGAA | RTT |
| | ACCCAG (SEQ ID NO: 1855) | |
| 24 | AAGATGGCTCAAGATTCAGT (SEQ ID NO: 24) | PE3 ngRNA spacer (AG PAM) |
| 25 | AAGATTCAGTAGATCTTTCT (SEQ ID NO: 25) | PE3 ngRNA spacer (TG PAM) |
| 26 | AAGCTTTCTGTATGGGATCA (SEQ ID NO: 26) | PE3b ngRNA spacer (GG PAM) |
| 27 | AGATCTTTCTTGTGATTATC (SEQ ID NO: 27) | PE3 ngRNA spacer (AG PAM) |
| 28 | ATGGGATCAGGCTTCCACTT (SEQ ID NO: 28) | PE3b ngRNA spacer (TG PAM) |
| 29 | CCTTTTCGCTTTTTCCAAGA (SEQ ID NO: 29) | PE3 ngRNA spacer (TG PAM) |
| 30 | CTTTTCGCTTTTTCCAAGAT (SEQ ID NO: 30) | PE3 ngRNA spacer (GG PAM) |
| 31 | GAAGCTTTCTGTATGGGATC (SEQ ID NO: 31) | PE3b ngRNA spacer (AG PAM) |
| 32 | GATGCAGAAGCTTTCTGTAT (SEQ ID NO: 32) | PE3 ngRNA spacer (GG PAM) |
| 33 | GATTCAGTAGATCTTTCTTG (SEQ ID NO: 33) | PE3 ngRNA spacer (TG PAM) |
| 34 | GCTTTTTCCAAGATGGCTCA (SEQ ID NO: 34) | PE3 ngRNA spacer (AG PAM) |
| 35 | GGATGCAGAAGCTTTCTGTA (SEQ ID NO: 35) | PE3 ngRNA spacer (TG PAM) |
| 36 | GGCTTCCACTTTGGAAACCC (SEQ ID NO: 36) | PE3 ngRNA spacer (AG PAM) |
| 37 | GTGAAGGGACATCACCTTTT (SEQ ID NO: 37) | PE3 ngRNA spacer (CG PAM) |
| 38 | TCACCTTTTCGCTTTTTCCA (SEQ ID NO: 38) | PE3 ngRNA spacer (AG PAM) |
| 39 | TCCAAGATGGCTCAAGATTC (SEQ ID NO: 39) | PE3 ngRNA spacer (AG PAM) |
| 40 | TCCACTTTGGAAACCCAGCA (SEQ ID NO: 40) | PE3 ngRNA spacer (AG PAM) |
| 41 | TGATTATCAGTTTTGGATGC (SEQ ID NO: 41) | PE3 ngRNA spacer (AG PAM) |
| 43 | TGGGATCAGGCTTCCACTTT (SEQ ID NO: 43) | PE3b ngRNA spacer (GG PAM) |
| 44 | TTATCAGTTTTGGATGCAGA (SEQ ID NO: 44) | PE3 ngRNA spacer (AG PAM) |
| 45 | TTCTTGTGATTATCAGTTTT (SEQ ID NO: 45) | PE3 ngRNA spacer (GG PAM) |
| 46 | TTGTGATTATCAGTTTTGGA (SEQ ID NO: 46) | PE3 ngRNA spacer (TG PAM) |
| 47 | TTTCTTGTGATTATCAGTTT (SEQ ID NO: 47) | PE3 ngRNA spacer (TG PAM) |
| 48 | TTTTGGATGCAGAAGCTTTC (SEQ ID NO: 48) | PE3 ngRNA spacer (TG PAM) |
| 49 | TTTCTTGTGATTATCAGTTTGTTTTAGAGCTAGAA | PE3 ngRNA (TG PAM) |
| | ATAGCAAGTTAAAATAAGGCTAGTCCGTTATCAA | |
| | CTTGAAAAAGTGGCACCGAGTCGGTGC (SEQ ID | |
| | NO: 49) | |
| 50 | GGATGCAGAAGCTTTCTGTAGTTTTAGAGCTAGA | PE3 ngRNA (TG PAM) |
| | AATAGCAAGTTAAAATAAGGCTAGTCCGTTATCA | |
| | ACTTGAAAAAGTGGCACCGAGTCGGTGC (SEQ ID | |
| | NO: 50) | |
| 51 | GAAGCTTTCTGTATGGGATCGTTTTAGAGCTAGA | PE3b ngRNA (AG PAM) |
| | AATAGCAAGTTAAAATAAGGCTAGTCCGTTATCA | |
| | ACTTGAAAAAGTGGCACCGAGTCGGTGC (SEQ ID | |
| | NO: 51) | |
| 52 | ATGGGATCAGGCTTCCACTTGTTTTAGAGCTAGA | PE3b ngRNA (TG PAM) |
| | AATAGCAAGTTAAAATAAGGCTAGTCCGTTATCA | |
| | ACTTGAAAAAGTGGCACCGAGTCGGTGC (SEQ ID | |
| | NO: 52) | |
| 53 | GGATGCAGAAGCTTTCTGTAGTTTTAGAGCTAGA | PE3 ngRNA (TG PAM), contains end |
| | AATAGCAAGTTAAAATAAGGCTAGTCCGTTATCA | adaptations |
| | ACTTGAAAAAGTGGCACCGAGTCGGTGCTTTT | |
| | (SEQ ID NO: 53) | |
| 54 | GAAGCTTTCTGTATGGGATCGTTTTAGAGCTAGA | PE3b ngRNA (AG PAM), contains end |
| | AATAGCAAGTTAAAATAAGGCTAGTCCGTTATCA | adaptations |
| | ACTTGAAAAAGTGGCACCGAGTCGGTGCTTTT | |
| | (SEQ ID NO: 54) | |
| 55 | GTTTCTTGTGATTATCAGTTTGTTTTAGAGCTAGA | PE3 ngRNA (TG PAM), contains end |
| | AATAGCAAGTTAAAATAAGGCTAGTCCGTTATCA | adaptations |
| | ACTTGAAAAAGTGGCACCGAGTCGGTGCTTTT | |
| | (SEQ ID NO: 55) | |
| 56 | GATGGGATCAGGCTTCCACTTGTTTTAGAGCTAG | PE3b ngRNA (TG PAM), contains end |
| | AAATAGCAAGTTAAAATAAGGCTAGTCCGTTATC | adaptations |
| | AACTTGAAAAAGTGGCACCGAGTCGGTGCTTTT | |
| | (SEQ ID NO: 56) | |
| 57 | GGATGCAGAAGCTTTCTGTAGTTTTAGAGCTAGA | PE3 ngRNA (TG PAM), contains linker |
| | AATAGCAAGTTAAAATAAGGCTAGTCCGTTATCA | sequence AACATTGA; hairpin SEQ ID |
| | ACTTGAAAAAGTGGCACCGAGTCGGTGCAACAT | NO: 3591; end adaptations |
| | TGACGCGTCTCTACGTGGGGGCGCGTTTT (SEQ | |
| | ID NO: 57) | |
| 58 | GAAGCTTTCTGTATGGGATCGTTTTAGAGCTAGA | PE3b ngRNA (AG PAM), contains linker |
| | AATAGCAAGTTAAAATAAGGCTAGTCCGTTATCA | sequence AACATTGA; hairpin SEQ ID |
| | ACTTGAAAAAGTGGCACCGAGTCGGTGCAACAT | NO: 3591; end adaptations |
| | TGACGCGTCTCTACGTGGGGGCGCGTTTT (SEQ | |
| | ID NO: 58) | |
| 59 | GTTTCTTGTGATTATCAGTTTGTTTTAGAGCTAGA | PE3 ngRNA (TG PAM), contains linker |
| | AATAGCAAGTTAAAATAAGGCTAGTCCGTTATCA | sequence AACATTGA; hairpin SEQ ID |
| | ACTTGAAAAAGTGGCACCGAGTCGGTGCAACAT | NO: 3591; end adaptations |
| | TGACGCGTCTCTACGTGGGGGCGCGTTTT (SEQ | |
| | ID NO: 59) | |
| 60 | GATGGGATCAGGCTTCCACTTGTTTTAGAGCTAG | PE3b ngRNA (TG PAM), contains linker |
| | AAATAGCAAGTTAAAATAAGGCTAGTCCGTTATC | sequence AACATTGA; hairpin SEQ ID |
| | AACTTGAAAAAGTGGCACCGAGTCGGTGCAACA | NO: 3591; end adaptations |
| | TTGACGCGTCTCTACGTGGGGGCGCGTTTT (SEQ | |
| | ID NO: 60) | |

TABLE 25

| Sequence | | |
|---|---|---|
| Number | Sequence | Description |
| 1856 | TTATCAGTTTTGGATGC (SEQ ID NO: 1856) | PEgRNA spacer (AG; AGA PAM) |
| 1857 | ATTATCAGTTTTGGATGC (SEQ ID NO: 1857) | PEgRNA spacer (AG; AGA PAM) |
| 1858 | GATTATCAGTTTTGGATGC (SEQ ID NO: 1858) | PEgRNA spacer (AG; AGA PAM) |
| 41 | TGATTATCAGTTTTGGATGC (SEQ ID NO: 41) | PEgRNA spacer (AG; AGA PAM) |
| 1859 | GTGATTATCAGTTTTGGATGC (SEQ ID NO: 1859) | PEgRNA spacer (AG; AGA PAM) |
| 1860 | TGTGATTATCAGTTTTGGATGC (SEQ ID NO: 1860) | PEgRNA spacer (AG; AGA PAM) |
| 1861 | TCCAA | PBS |
| 1862 | TCCAAA | PBS |
| 1863 | TCCAAAA | PBS |
| 1864 | TCCAAAAC | PBS |
| 1865 | TCCAAAACT | PBS |
| 1866 | TCCAAAACTG (SEQ ID NO: 1866) | PBS |
| 1867 | TCCAAAACTGA (SEQ ID NO: 1867) | PBS |
| 1868 | TCCAAAACTGAT (SEQ ID NO: 1868) | PBS |
| 1869 | TCCAAAACTGATA (SEQ ID NO: 1869) | PBS |
| 1870 | TCCAAAACTGATAA (SEQ ID NO: 1870) | PBS |
| 1871 | TCCAAAACTGATAAT (SEQ ID NO: 1871) | PBS |
| 1872 | TCCAAAACTGATAATC (SEQ ID NO: 1872) | PBS |
| 1873 | TCCAAAACTGATAATCA (SEQ ID NO: 1873) | PBS |
| 1874 | TCCAAAACTGATAATCAC (SEQ ID NO: 1874) | PBS |
| 1875 | TCCAAAACTGATAATCACA (SEQ ID NO: 1875) | PBS |
| 1876 | CCCATACAGAAAGCTTCTGCA (SEQ ID NO: 1876) | RTT*1, 2, 4 |
| 1877 | CCCATACAGAAAGCTTTTGCA (SEQ ID NO: 1877) | RTT*1, 3, 4 (AG-to-AA; AGA-to-AAA PAM |
| | | silencing edit) |
| 1878 | TCCCATACAGAAAGCTTCTGCA (SEQ ID NO: 1878) | RTT*1, 2, 4 |
| 1879 | TCCCATACAGAAAGCTTTTGCA (SEQ ID NO: 1879) | RTT*1, 3, 4 (AG-to-AA; AGA-to-AAA PAM |
| | | silencing edit) |
| 1880 | ATCCCATACAGAAAGCTTCTGCA (SEQ ID NO: | RTT*1, 2, 4 |
| | 1880) | |
| 1881 | ATCCCATACAGAAAGCTTTTGCA (SEQ ID NO: | RTT*1, 3, 4 (AG-to-AA; AGA-to-AAA PAM |
| | 1881) | silencing edit) |
| 1882 | GATCCCATACAGAAAGCTTCTGCA (SEQ ID NO: | RTT*1, 2, 4 |
| | 1882) | |
| 1883 | GATCCCATACAGAAAGCTTTTGCA (SEQ ID NO: | RTT*1, 3, 4 (AG-to-AA; AGA-to-AAA PAM |
| | 1883) | silencing edit) |
| 1884 | TGATCCCATACAGAAAGCTTCTGCA (SEQ ID NO: | RTT*1, 2, 4 |
| | 1884) | |
| 1885 | TGATCCCATACAGAAAGCTTTTGCA (SEQ ID NO: | RTT*1, 3, 4 (AG-to-AA; AGA-to-AAA PAM |
| | 1885) | silencing edit) |
| 1886 | CTGATCCCATACAGAAAGCTTCTGCA (SEQ ID | RTT*1, 2, 4 |
| | NO: 1886) | |
| 1887 | CTGATCCCATACAGAAAGCTTTTGCA (SEQ ID | RTT*1, 3, 4 (AG-to-AA; AGA-to-AAA PAM |
| | NO: 1887) | silencing edit) |
| 1888 | CCTGATCCCATACAGAAAGCTTCTGCA (SEQ ID | RTT*1, 2, 4 |
| | NO: 1888) | |
| 1889 | CCTGATCCCATACAGAAAGCTTTTGCA (SEQ ID | RTT*1, 3, 4 (AG-to-AA; AGA-to-AAA PAM |
| | NO: 1889) | silencing edit) |
| 1890 | GCCTGATCCCATACAGAAAGCTTCTGCA (SEQ ID | RTT*1, 2, 4 |
| | NO: 1890) | |
| 1891 | GCCTGATCCCATACAGAAAGCTTTTGCA (SEQ ID | RTT*1, 3, 4 (AG-to-AA; AGA-to-AAA PAM |
| | NO: 1891) | silencing edit) |
| 1892 | AGCCTGATCCCATACAGAAAGCTTCTGCA (SEQ | RTT*1, 2, 4 |
| | ID NO: 1892) | |
| 1893 | AGCCTGATCCCATACAGAAAGCTTTTGCA (SEQ | RTT*1, 3, 4 (AG-to-AA; AGA-to-AAA PAM |
| | ID NO: 1893) | silencing edit) |
| 1894 | AAGCCTGATCCCATACAGAAAGCTTCTGCA (SEQ | RTT*1, 2, 4 |
| | ID NO: 1894) | |
| 1895 | AAGCCTGATCCCATACAGAAAGCTTTTGCA (SEQ | RTT*1, 3, 4 (AG-to-AA; AGA-to-AAA PAM |
| | ID NO: 1895) | silencing edit) |
| 1896 | GAAGCCTGATCCCATACAGAAAGCTTCTGCA | RTT*1, 2, 4 |
| | (SEQ ID NO: 1896) | |
| 1897 | GAAGCCTGATCCCATACAGAAAGCTTTTGCA | RTT*1, 3, 4 (AG-to-AA; AGA-to-AAA PAM |
| | (SEQ ID NO: 1897) | silencing edit) |
| 1898 | GGAAGCCTGATCCCATACAGAAAGCTTCTGCA | RTT*1, 2, 4 |
| | (SEQ ID NO: 1898) | |
| 1899 | GGAAGCCTGATCCCATACAGAAAGCTTTTGCA | RTT*1, 3, 4 (AG-to-AA; AGA-to-AAA PAM |
| | (SEQ ID NO: 1899) | silencing edit) |
| 1900 | TGGAAGCCTGATCCCATACAGAAAGCTTCTGCA | RTT*1, 2, 4 |
| | (SEQ ID NO: 1900) | |
| 1901 | TGGAAGCCTGATCCCATACAGAAAGCTTTTGCA | RTT*1, 3, 4 (AG-to-AA; AGA-to-AAA PAM |
| | (SEQ ID NO: 1901) | silencing edit) |
| 1902 | GTGGAAGCCTGATCCCATACAGAAAGCTTCTGC | RTT*1, 2, 4 |
| | A (SEQ ID NO: 1902) | |
| 1903 | GTGGAAGCCTGATCCCATACAGAAAGCTTTTGCA | RTT*1, 3, 4 (AG-to-AA; AGA-to-AAA PAM |
| | (SEQ ID NO: 1903) | silencing edit) |
| 1904 | AGTGGAAGCCTGATCCCATACAGAAAGCTTCTG | RTT*1, 2, 4 |
| | CA (SEQ ID NO: 1904) | |
| 1905 | AGTGGAAGCCTGATCCCATACAGAAAGCTTTTGC | RTT*1, 3, 4 (AG-to-AA; AGA-to-AAA PAM |
| | A (SEQ ID NO: 1905) | silencing edit) |
| 1906 | AAGTGGAAGCCTGATCCCATACAGAAAGCTTCT | RTT*1, 2, 4 |
| | GCA (SEQ ID NO: 1906) | |
| 1907 | AAGTGGAAGCCTGATCCCATACAGAAAGCTTTTG | RTT*1, 3, 4 (AG-to-AA; AGA-to-AAA PAM |
| | CA (SEQ ID NO: 1907) | silencing edit) |
| 1908 | AAAGTGGAAGCCTGATCCCATACAGAAAGCTTC | RTT*1, 2, 4 |
| | TGCA (SEQ ID NO: 1908) | |
| 1909 | AAAGTGGAAGCCTGATCCCATACAGAAAGCTTTT | RTT*1, 3, 4 (AG-to-AA; AGA-to-AAA PAM |
| | GCA (SEQ ID NO: 1909) | silencing edit) |
| 1910 | CAAAGTGGAAGCCTGATCCCATACAGAAAGCTT | RTT*1, 2, 4 |
| | CTGCA (SEQ ID NO: 1910) | |
| 1911 | CAAAGTGGAAGCCTGATCCCATACAGAAAGCTT | RTT*1, 3, 4 (AG-to-AA; AGA-to-AAA PAM |
| | TTGCA (SEQ ID NO: 1911) | silencing edit) |
| 1912 | CCAAAGTGGAAGCCTGATCCCATACAGAAAGCT | RTT*1, 2, 4 |
| | TCTGCA (SEQ ID NO: 1912) | |
| 1913 | CCAAAGTGGAAGCCTGATCCCATACAGAAAGCT | RTT*1, 3, 4 (AG-to-AA; AGA-to-AAA PAM |
| | TTTGCA (SEQ ID NO: 1913) | silencing edit) |
| 1914 | TCCAAAGTGGAAGCCTGATCCCATACAGAAAGC | RTT*1, 2, 4 |
| | TTCTGCA (SEQ ID NO: 1914) | |
| 1915 | TCCAAAGTGGAAGCCTGATCCCATACAGAAAGC | RTT*1, 3, 4 (AG-to-AA; AGA-to-AAA PAM |
| | TTTTGCA (SEQ ID NO: 1915) | silencing edit) |
| 4 | AACTGAGCCACGTGAAGACA (SEQ ID NO: 4) | PE3 ngRNA spacer (GG PAM) |
| 382 | AAGCCTGATCCCATACAGAA (SEQ ID NO: 382) | PE3b*1 ngRNA spacer (AG PAM) |
| 195 | ACATCTTCCTTAGGAACTCC (SEQ ID NO: 195) | PE3 ngRNA spacer (TG PAM) |
| 196 | ACTACTTACCATCTCTTTCA (SEQ ID NO: 196) | PE3 ngRNA spacer (AG PAM) |
| 197 | ACTCCTGGAACTGAGCCACG (SEQ ID NO: 197) | PE3 ngRNA spacer (TG; TGA PAM) |
| 199 | AGGCTTCATACATCTTCCTT (SEQ ID NO: 199) | PE3 ngRNA spacer (AG PAM) |
| 200 | CATCTTCCTTAGGAACTCCT (SEQ ID NO: 200) | PE3 ngRNA spacer (GG; GGA PAM) |
| 201 | CCACGTGAAGACAGGTGTCT (SEQ ID NO: 201) | PE3 ngRNA spacer (TG PAM) |
| 202 | CCTGGAACTGAGCCACGTGA (SEQ ID NO: 202) | PE3 ngRNA spacer (AG; AGA PAM) |
| 203 | CGTGAAGACAGGTGTCTTGC (SEQ ID NO: 203) | PE3 ngRNA spacer (TG PAM) |
| 204 | CTACTTACCATCTCTTTCAA (SEQ ID NO: 204) | PE3 ngRNA spacer (GG PAM) |
| 205 | CTGAGCCACGTGAAGACAGG (SEQ ID NO: 205) | PE3 ngRNA spacer (TG PAM) |
| 206 | CTTAGGAACTCCTGGAACTG (SEQ ID NO: 206) | PE3 ngRNA spacer (AG PAM) |
| 208 | GAACTCCTGGAACTGAGCCA (SEQ ID NO: 208) | PE3 ngRNA spacer (CG PAM) |
| 209 | GAACTGAGCCACGTGAAGAC (SEQ ID NO: 209) | PE3 ngRNA spacer (AG PAM) |
| 383 | GATCCCATACAGAAAGCTTC (SEQ ID NO: 383) | PE3b*2 ngRNA spacer (TG PAM) |
| 1916 | GATCCCATACAGAAAGCTTT (SEQ ID NO: 1916) | PE3b*3 ngRNA spacer (TG PAM) |
| 210 | GGCTTCATACATCTTCCTTA (SEQ ID NO: 210) | PE3 ngRNA spacer (GG; GGA PAM) |
| 211 | GGGTTTCCAAAGTGGAAGCC (SEQ ID NO: 211) | PE3 ngRNA spacer (TG; TGA PAM) |
| 212 | GTCTTGCTGGGTTTCCAAAG (SEQ ID NO: 212) | PE3 ngRNA spacer (TG PAM) |
| 213 | GTGAAGACAGGTGTCTTGCT (SEQ ID NO: 213) | PE3 ngRNA spacer (GG PAM) |
| 384 | GTGGAAGCCTGATCCCATAC (SEQ ID NO: 384) | PE3b*4 ngRNA spacer (AG; AGA PAM) |
| 214 | GTGTCTTGCTGGGTTTCCAA (SEQ ID NO: 214) | PE3 ngRNA spacer (AG PAM) |
| 215 | TCCTTAGGAACTCCTGGAAC (SEQ ID NO: 215) | PE3 ngRNA spacer (TG; TGA PAM) |
| 216 | TCTTGCTGGGTTTCCAAAGT (SEQ ID NO: 216) | PE3 ngRNA spacer (GG; GGA PAM) |
| 217 | TGAAGACAGGTGTCTTGCTG (SEQ ID NO: 217) | PE3 ngRNA spacer (GG PAM) |
| 218 | TGCTGGGTTTCCAAAGTGGA (SEQ ID NO: 218) | PE3 ngRNA spacer (AG PAM) |
| 323 | GTCTTGCTGGGTTTCCAAAGGTTTTAGAGCTAGA | PE3 ngRNA (TG PAM) |
| | AATAGCAAGTTAAAATAAGGCTAGTCCGTTATCA | |
| | ACTTGAAAAAGTGGCACCGAGTCGGTGC (SEQ ID | |
| | NO: 323) | |
| 324 | GTGAAGACAGGTGTCTTGCTGTTTTAGAGCTAGA | PE3 ngRNA (GG PAM) |
| | AATAGCAAGTTAAAATAAGGCTAGTCCGTTATCA | |
| | ACTTGAAAAAGTGGCACCGAGTCGGTGC (SEQ ID | |
| | NO: 324) | |
| 325 | CGTGAAGACAGGTGTCTTGCGTTTTAGAGCTAGA | PE3 ngRNA (TG PAM) |
| | AATAGCAAGTTAAAATAAGGCTAGTCCGTTATCA | |
| | ACTTGAAAAAGTGGCACCGAGTCGGTGC (SEQ ID | |
| | NO: 325) | |
| 326 | GAACTGAGCCACGTGAAGACGTTTTAGAGCTAG | PE3 ngRNA (AG PAM) |
| | AAATAGCAAGTTAAAATAAGGCTAGTCCGTTATC | |
| | AACTTGAAAAAGTGGCACCGAGTCGGTGC (SEQ | |
| | ID NO: 326) | |
| 327 | ACATCTTCCTTAGGAACTCCGTTTTAGAGCTAGA | PE3 ngRNA (TG PAM) |
| | AATAGCAAGTTAAAATAAGGCTAGTCCGTTATCA | |
| | ACTTGAAAAAGTGGCACCGAGTCGGTGC (SEQ ID | |
| | NO: 327) | |
| 328 | AGGCTTCATACATCTTCCTTGTTTTAGAGCTAGA | PE3 ngRNA (AG PAM) |
| | AATAGCAAGTTAAAATAAGGCTAGTCCGTTATCA | |
| | ACTTGAAAAAGTGGCACCGAGTCGGTGC (SEQ ID | |
| | NO: 328) | |
| 329 | ACTACTTACCATCTCTTTCAGTTTTAGAGCTAGA | PE3 ngRNA (AG PAM) |
| | AATAGCAAGTTAAAATAAGGCTAGTCCGTTATCA | |
| | ACTTGAAAAAGTGGCACCGAGTCGGTGC (SEQ ID | |
| | NO: 329) | |
| 330 | GTCTTGCTGGGTTTCCAAAGGTTTTAGAGCTAGA | PE3 ngRNA (TG PAM), contains end |
| | AATAGCAAGTTAAAATAAGGCTAGTCCGTTATCA | adaptations |
| | ACTTGAAAAAGTGGCACCGAGTCGGTGCTTTT | |
| | (SEQ ID NO: 330) | |
| 331 | GTGAAGACAGGTGTCTTGCTGTTTTAGAGCTAGA | PE3 ngRNA (GG PAM), contains end |
| | AATAGCAAGTTAAAATAAGGCTAGTCCGTTATCA | adaptations |
| | ACTTGAAAAAGTGGCACCGAGTCGGTGCTTTT | |
| | (SEQ ID NO: 331) | |
| 332 | GAACTGAGCCACGTGAAGACGTTTTAGAGCTAG | PE3 ngRNA (AG PAM), contains end |
| | AAATAGCAAGTTAAAATAAGGCTAGTCCGTTATC | adaptations |
| | AACTTGAAAAAGTGGCACCGAGTCGGTGCTTTT | |
| | (SEQ ID NO: 332) | |
| 333 | GCGTGAAGACAGGTGTCTTGCGTTTTAGAGCTAG | PE3 ngRNA (TG PAM), contains end |
| | AAATAGCAAGTTAAAATAAGGCTAGTCCGTTATC | adaptations |
| | AACTTGAAAAAGTGGCACCGAGTCGGTGCTTTT | |
| | (SEQ ID NO: 333) | |
| 334 | GACATCTTCCTTAGGAACTCCGTTTTAGAGCTAG | PE3 ngRNA (TG PAM), contains end |
| | AAATAGCAAGTTAAAATAAGGCTAGTCCGTTATC | adaptations |
| | AACTTGAAAAAGTGGCACCGAGTCGGTGCTTTT | |
| | (SEQ ID NO: 334) | |
| 335 | GAGGCTTCATACATCTTCCTTGTTTTAGAGCTAG | PE3 ngRNA (AG PAM), contains end |
| | AAATAGCAAGTTAAAATAAGGCTAGTCCGTTATC | adaptations |
| | AACTTGAAAAAGTGGCACCGAGTCGGTGCTTTT | |
| | (SEQ ID NO: 335) | |
| 336 | GACTACTTACCATCTCTTTCAGTTTTAGAGCTAG | PE3 ngRNA (AG PAM), contains end |
| | AAATAGCAAGTTAAAATAAGGCTAGTCCGTTATC | adaptations |
| | AACTTGAAAAAGTGGCACCGAGTCGGTGCTTTT | |
| | (SEQ ID NO: 336) | |
| 337 | GTCTTGCTGGGTTTCCAAAGGTTTTAGAGCTAGA | PE3 ngRNA (TG PAM), contains linker |
| | AATAGCAAGTTAAAATAAGGCTAGTCCGTTATCA | sequence AACATTGA; hairpin SEQ ID |
| | ACTTGAAAAAGTGGCACCGAGTCGGTGCAACAT | NO: 3591; end adaptations |
| | TGACGCGTCTCTACGTGGGGGCGCGTTTT (SEQ | |
| | ID NO: 337) | |
| 338 | GTGAAGACAGGTGTCTTGCTGTTTTAGAGCTAGA | PE3 ngRNA (GG PAM), contains linker |
| | AATAGCAAGTTAAAATAAGGCTAGTCCGTTATCA | sequence AACATTGA; hairpin SEQ ID |
| | ACTTGAAAAAGTGGCACCGAGTCGGTGCAACAT | NO: 3591; end adaptations |
| | TGACGCGTCTCTACGTGGGGGCGCGTTTT (SEQ | |
| | ID NO: 338) | |
| 339 | GAACTGAGCCACGTGAAGACGTTTTAGAGCTAG | PE3 ngRNA (AG PAM), contains linker |
| | AAATAGCAAGTTAAAATAAGGCTAGTCCGTTATC | sequence AACATTGA; hairpin SEQ ID |
| | AACTTGAAAAAGTGGCACCGAGTCGGTGCAACA | NO: 3591; end adaptations |
| | TTGACGCGTCTCTACGTGGGGGCGCGTTTT (SEQ | |
| | ID NO: 339) | |
| 340 | GCGTGAAGACAGGTGTCTTGCGTTTTAGAGCTAG | PE3 ngRNA (TG PAM), contains linker |
| | AAATAGCAAGTTAAAATAAGGCTAGTCCGTTATC | sequence AACATTGA; hairpin SEQ ID |
| | AACTTGAAAAAGTGGCACCGAGTCGGTGCAACA | NO: 3591; end adaptations |
| | TTGACGCGTCTCTACGTGGGGGCGCGTTTT (SEQ | |
| | ID NO: 340) | |
| 341 | GACATCTTCCTTAGGAACTCCGTTTTAGAGCTAG | PE3 ngRNA (TG PAM), contains linker |
| | AAATAGCAAGTTAAAATAAGGCTAGTCCGTTATC | sequence AACATTGA; hairpin SEQ ID |
| | AACTTGAAAAAGTGGCACCGAGTCGGTGCAACA | NO: 3591; end adaptations |
| | TTGACGCGTCTCTACGTGGGGGCGCGTTTT (SEQ | |
| | ID NO: 341) | |
| 342 | GAGGCTTCATACATCTTCCTTGTTTTAGAGCTAG | PE3 ngRNA (AG PAM), contains linker |
| | AAATAGCAAGTTAAAATAAGGCTAGTCCGTTATC | sequence AACATTGA; hairpin SEQ ID |
| | AACTTGAAAAAGTGGCACCGAGTCGGTGCAACA | NO: 3591; end adaptations |
| | TTGACGCGTCTCTACGTGGGGGCGCGTTTT (SEQ | |
| | ID NO: 342) | |
| 343 | GACTACTTACCATCTCTTTCAGTTTTAGAGCTAG | PE3 ngRNA (AG PAM), contains linker |
| | AAATAGCAAGTTAAAATAAGGCTAGTCCGTTATC | sequence AACATTGA; hairpin SEQ ID |
| | AACTTGAAAAAGTGGCACCGAGTCGGTGCAACA | NO: 3591; end adaptations |
| | TTGACGCGTCTCTACGTGGGGGCGCGTTTT (SEQ | |
| | ID NO: 343) | |

TABLE 26

| Sequence | | |
|---|---|---|
| Number | Sequence | Description |
| 1917 | TGGGTTTCCAAAGTGGA (SEQ ID NO: 1917) | PEgRNA spacer (AG PAM) |
| 1918 | CTGGGTTTCCAAAGTGGA (SEQ ID NO: 1918) | PEgRNA spacer (AG PAM) |
| 1919 | GCTGGGTTTCCAAAGTGGA (SEQ ID NO: 1919) | PEgRNA spacer (AG PAM) |
| 218 | TGCTGGGTTTCCAAAGTGGA (SEQ ID NO: 218) | PEgRNA spacer (AG PAM) |
| 1920 | TTGCTGGGTTTCCAAAGTGGA (SEQ ID NO: 1920) | PEgRNA spacer (AG PAM) |
| 1921 | CTTGCTGGGTTTCCAAAGTGGA (SEQ ID NO: 1921) | PERNA spacer (AG PAM) |
| 1922 | ACTTT | PBS |
| 1923 | ACTTTG | PBS |
| 1924 | ACTTTGG | PBS |
| 1925 | ACTTTGGA | PBS |
| 1926 | ACTTTGGAA | PBS |
| 1927 | ACTTTGGAAA (SEQ ID NO: 1927) | PBS |
| 1928 | ACTTTGGAAAC (SEQ ID NO: 1928) | PBS |
| 1929 | ACTTTGGAAACC (SEQ ID NO: 1929) | PBS |
| 1930 | ACTTTGGAAACCC (SEQ ID NO: 1930) | PBS |
| 1931 | ACTTTGGAAACCCA (SEQ ID NO: 1931) | PBS |
| 1932 | ACTTTGGAAACCCAG (SEQ ID NO: 1932) | PBS |
| 1933 | ACTTTGGAAACCCAGC (SEQ ID NO: 1933) | PBS |
| 1934 | ACTTTGGAAACCCAGCA (SEQ ID NO: 1934) | PBS |
| 1935 | ACTTTGGAAACCCAGCAA (SEQ ID NO: 1935) | PBS |
| 1936 | ACTTTGGAAACCCAGCAAG (SEQ ID NO: 1936) | PBS |
| 1937 | GATCAGGCTTCC (SEQ ID NO: 1937) | RTT |
| 1938 | GGATCAGGCTTCC (SEQ ID NO: 1938) | RTT |
| 1939 | GGGATCAGGCTTCC (SEQ ID NO: 1939) | RTT |
| 1940 | TGGGATCAGGCTTCC (SEQ ID NO: 1940) | RTT |
| 1941 | ATGGGATCAGGCTTCC (SEQ ID NO: 1941) | RTT |
| 1942 | TATGGGATCAGGCTTCC (SEQ ID NO: 1942) | RTT |
| 1943 | GTATGGGATCAGGCTTCC (SEQ ID NO: 1943) | RTT |
| 1944 | TGTATGGGATCAGGCTTCC (SEQ ID NO: 1944) | RTT |
| 1945 | CTGTATGGGATCAGGCTTCC (SEQ ID NO: 1945) | RTT |
| 1946 | TCTGTATGGGATCAGGCTTCC (SEQ ID NO: 1946) | RTT |
| 1947 | TTCTGTATGGGATCAGGCTTCC (SEQ ID NO: 1947) | RTT |
| 1948 | TTTCTGTATGGGATCAGGCTTCC (SEQ ID NO: | RTT |
| | 1948) | |
| 1949 | CTTTCTGTATGGGATCAGGCTTCC (SEQ ID NO: | RTT |
| | 1949) | |
| 1950 | GCTTTCTGTATGGGATCAGGCTTCC (SEQ ID NO: | RTT |
| | 1950) | |
| 1951 | AGCTTTCTGTATGGGATCAGGCTTCC (SEQ ID NO: | RTT |
| | 1951) | |
| 1952 | AAGCTTTCTGTATGGGATCAGGCTTCC (SEQ ID | RTT |
| | NO: 1952) | |
| 1953 | GAAGCTTTCTGTATGGGATCAGGCTTCC (SEQ ID | RTT |
| | NO: 1953) | |
| 1954 | AGAAGCTTTCTGTATGGGATCAGGCTTCC (SEQ | RTT |
| | ID NO: 1954) | |
| 1955 | CAGAAGCTTTCTGTATGGGATCAGGCTTCC (SEQ | RTT |
| | ID NO: 1955) | |
| 1956 | GCAGAAGCTTTCTGTATGGGATCAGGCTTCC | RTT |
| | (SEQ ID NO: 1956) | |
| 1957 | TGCAGAAGCTTTCTGTATGGGATCAGGCTTCC | RTT |
| | (SEQ ID NO: 1957) | |
| 1958 | ATGCAGAAGCTTTCTGTATGGGATCAGGCTTCC | RTT |
| | (SEQ ID NO: 1958) | |
| 1959 | GATGCAGAAGCTTTCTGTATGGGATCAGGCTTCC | RTT |
| | (SEQ ID NO: 1959) | |
| 1960 | GGATGCAGAAGCTTTCTGTATGGGATCAGGCTTC | RTT |
| | C (SEQ ID NO: 1960) | |
| 1961 | TGGATGCAGAAGCTTTCTGTATGGGATCAGGCTT | RTT |
| | CC (SEQ ID NO: 1961) | |
| 1962 | TTGGATGCAGAAGCTTTCTGTATGGGATCAGGCT | RTT |
| | TCC (SEQ ID NO: 1962) | |
| 1963 | TTTGGATGCAGAAGCTTTCTGTATGGGATCAGGC | RTT |
| | TTCC (SEQ ID NO: 1963) | |
| 1964 | TTTTGGATGCAGAAGCTTTCTGTATGGGATCAGG | RTT |
| | CTTCC (SEQ ID NO: 1964) | |
| 1965 | GTTTTGGATGCAGAAGCTTTCTGTATGGGATCAG | RTT |
| | GCTTCC (SEQ ID NO: 1965) | |
| 24 | AAGATGGCTCAAGATTCAGT (SEQ ID NO: 24) | PE3 ngRNA spacer (AG PAM) |
| 25 | AAGATTCAGTAGATCTTTCT (SEQ ID NO: 25) | PE3 ngRNA spacer (TG PAM) |
| 26 | AAGCTTTCTGTATGGGATCA (SEQ ID NO: 26) | PE3b ngRNA spacer (GG PAM) |
| 27 | AGATCTTTCTTGTGATTATC (SEQ ID NO: 27) | PE3 ngRNA spacer (AG PAM) |
| 1107 | ATTTCCTTCAGTGCTGGACA (SEQ ID NO: 1107) | PE3 ngRNA spacer (GG PAM) |
| 1108 | CAGTGCTGGACAGGCTGCTG (SEQ ID NO: 1108) | PE3 ngRNA spacer (TG PAM) |
| 29 | CCTTTTCGCTTTTTCCAAGA (SEQ ID NO: 29) | PE3 ngRNA spacer (TG PAM) |
| 1110 | CTGGACAGGCTGCTGTGAAG (SEQ ID NO: 1110) | PE3 ngRNA spacer (GG PAM) |
| 30 | CTTTTCGCTTTTTCCAAGAT (SEQ ID NO: 30) | PE3 ngRNA spacer (GG PAM) |
| 31 | GAAGCTTTCTGTATGGGATC (SEQ ID NO: 31) | PE3b ngRNA spacer (AG PAM) |
| 32 | GATGCAGAAGCTTTCTGTAT (SEQ ID NO: 32) | PE3 ngRNA spacer (GG PAM) |
| 33 | GATTCAGTAGATCTTTCTTG (SEQ ID NO: 33) | PE3 ngRNA spacer (TG PAM) |
| 1111 | GCTGGACAGGCTGCTGTGAA (SEQ ID NO: 1111) | PE3 ngRNA spacer (GG PAM) |
| 34 | GCTTTTTCCAAGATGGCTCA (SEQ ID NO: 34) | PE3 ngRNA spacer (AG PAM) |
| 35 | GGATGCAGAAGCTTTCTGTA (SEQ ID NO: 35) | PE3 ngRNA spacer (TG PAM) |
| 37 | GTGAAGGGACATCACCTTTT (SEQ ID NO: 37) | PE3 ngRNA spacer (CG PAM) |
| 38 | TCACCTTTTCGCTTTTTCCA (SEQ ID NO: 38) | PE3 ngRNA spacer (AG PAM) |
| 39 | TCCAAGATGGCTCAAGATTC (SEQ ID NO: 39) | PE3 ngRNA spacer (AG PAM) |
| 1112 | TCCTTCAGTGCTGGACAGGC (SEQ ID NO: 1112) | PE3 ngRNA spacer (TG PAM) |
| 41 | TGATTATCAGTTTTGGATGC (SEQ ID NO: 41) | PE3 ngRNA spacer (AG PAM) |
| 1113 | TGCTGGACAGGCTGCTGTGA (SEQ ID NO: 1113) | PE3 ngRNA spacer (AG PAM) |
| 44 | TTATCAGTTTTGGATGCAGA (SEQ ID NO: 44) | PE3 ngRNA spacer (AG PAM) |
| 1114 | TTCAGTGCTGGACAGGCTGC (SEQ ID NO: 1114) | PE3 ngRNA spacer (TG PAM) |
| 45 | TTCTTGTGATTATCAGTTTT (SEQ ID NO: 45) | PE3 ngRNA spacer (GG PAM) |
| 46 | TTGTGATTATCAGTTTTGGA (SEQ ID NO: 46) | PE3 ngRNA spacer (TG PAM) |
| 47 | TTTCTTGTGATTATCAGTTT (SEQ ID NO: 47) | PE3 ngRNA spacer (TG PAM) |
| 48 | TTTTGGATGCAGAAGCTTTC (SEQ ID NO: 48) | PE3 ngRNA spacer (TG PAM) |
| 49 | TTTCTTGTGATTATCAGTTTGTTTTAGAGCTAGAA | PE3 ngRNA (TG PAM) |
| | ATAGCAAGTTAAAATAAGGCTAGTCCGTTATCAA | |
| | CTTGAAAAAGTGGCACCGAGTCGGTGC (SEQ ID | |
| | NO: 49) | |
| 50 | GGATGCAGAAGCTTTCTGTAGTTTTAGAGCTAGA | PE3 ngRNA (TG PAM) |
| | AATAGCAAGTTAAAATAAGGCTAGTCCGTTATCA | |
| | ACTTGAAAAAGTGGCACCGAGTCGGTGC (SEQ ID | |
| | NO: 50) | |
| 51 | GAAGCTTTCTGTATGGGATCGTTTTAGAGCTAGA | PE3b ngRNA (AG PAM) |
| | AATAGCAAGTTAAAATAAGGCTAGTCCGTTATCA | |
| | ACTTGAAAAAGTGGCACCGAGTCGGTGC (SEQ ID | |
| | NO: 51) | |
| 53 | GGATGCAGAAGCTTTCTGTAGTTTTAGAGCTAGA | PE3 ngRNA (TG PAM), contains end |
| | AATAGCAAGTTAAAATAAGGCTAGTCCGTTATCA | adaptations |
| | ACTTGAAAAAGTGGCACCGAGTCGGTGCTTTT | |
| | (SEQ ID NO: 53) | |
| 54 | GAAGCTTTCTGTATGGGATCGTTTTAGAGCTAGA | PE3b ngRNA (AG PAM), contains end |
| | AATAGCAAGTTAAAATAAGGCTAGTCCGTTATCA | adaptations |
| | ACTTGAAAAAGTGGCACCGAGTCGGTGCTTTT | |
| | (SEQ ID NO: 54) | |
| 55 | GTTTCTTGTGATTATCAGTTTGTTTTAGAGCTAGA | PE3 ngRNA (TG PAM), contains end |
| | AATAGCAAGTTAAAATAAGGCTAGTCCGTTATCA | adaptations |
| | ACTTGAAAAAGTGGCACCGAGTCGGTGCTTTT | |
| | (SEQ ID NO: 55) | |
| 57 | GGATGCAGAAGCTTTCTGTAGTTTTAGAGCTAGA | PE3 ngRNA (TG PAM), contains linker |
| | AATAGCAAGTTAAAATAAGGCTAGTCCGTTATCA | sequence AACATTGA; hairpin SEQ ID |
| | ACTTGAAAAAGTGGCACCGAGTCGGTGCAACAT | NO: 3591; end adaptations |
| | TGACGCGTCTCTACGTGGGGGCGCGTTTT (SEQ | |
| | ID NO: 57) | |
| 58 | GAAGCTTTCTGTATGGGATCGTTTTAGAGCTAGA | PE3b ngRNA (AG PAM), contains linker |
| | AATAGCAAGTTAAAATAAGGCTAGTCCGTTATCA | sequence AACATTGA; hairpin SEQ ID |
| | ACTTGAAAAAGTGGCACCGAGTCGGTGCAACAT | NO: 3591; end adaptations |
| | TGACGCGTCTCTACGTGGGGGCGCGTTTT (SEQ | |
| | ID NO: 58) | |
| 59 | GTTTCTTGTGATTATCAGTTTGTTTTAGAGCTAGA | PE3 ngRNA (TG PAM), contains linker |
| | AATAGCAAGTTAAAATAAGGCTAGTCCGTTATCA | sequence AACATTGA; hairpin SEQ ID |
| | ACTTGAAAAAGTGGCACCGAGTCGGTGCAACAT | NO: 3591; end adaptations |
| | TGACGCGTCTCTACGTGGGGGCGCGTTTT (SEQ | |
| | ID NO: 59) | |

TABLE 27

| Sequence | | |
|---|---|---|
| Number | Sequence | Description |
| 1966 | ATGCAGAAGCTTTCTGT (SEQ ID NO: 1966) | PERNA spacer (ATGG; ATGGAT PAM) |
| 1967 | GATGCAGAAGCTTTCTGT (SEQ ID NO: 1967) | PEgRNA spacer (ATGG; ATGGAT PAM) |
| 1968 | GGATGCAGAAGCTTTCTGT (SEQ ID NO: 1968) | PEgRNA spacer (ATGG; ATGGAT PAM) |
| 134 | TGGATGCAGAAGCTTTCTGT (SEQ ID NO: 134) | PEgRNA spacer (ATGG; ATGGAT PAM) |
| 1969 | TTGGATGCAGAAGCTTTCTGT (SEQ ID NO: 1969) | PEgRNA spacer (ATGG; ATGGAT PAM) |
| 1970 | TTTGGATGCAGAAGCTTTCTGT (SEQ ID NO: 1970) | PEgRNA spacer (ATGG; ATGGAT PAM) |
| 1971 | GAAAG | PBS |
| 1972 | GAAAGC | PBS |
| 1973 | GAAAGCT | PBS |
| 1974 | GAAAGCTT | PBS |
| 1975 | GAAAGCTTC | PBS |
| 1976 | GAAAGCTTCT (SEQ ID NO: 1976) | PBS |
| 1977 | GAAAGCTTCTG (SEQ ID NO: 1977) | PBS |
| 1978 | GAAAGCTTCTGC (SEQ ID NO: 1978) | PBS |
| 1979 | GAAAGCTTCTGCA (SEQ ID NO: 1979) | PBS |
| 1980 | GAAAGCTTCTGCAT (SEQ ID NO: 1980) | PBS |
| 1981 | GAAAGCTTCTGCATC (SEQ ID NO: 1981) | PBS |
| 1982 | GAAAGCTTCTGCATCC (SEQ ID NO: 1982) | PBS |
| 1983 | GAAAGCTTCTGCATCCA (SEQ ID NO: 1983) | PBS |
| 1984 | GAAAGCTTCTGCATCCAA (SEQ ID NO: 1984) | PBS |
| 1985 | GAAAGCTTCTGCATCCAAA (SEQ ID NO: 1985) | PBS |
| 1986 | ATCCCATACA (SEQ ID NO: 1986) | RTT |
| 1987 | GATCCCATACA (SEQ ID NO: 1987) | RTT |
| 1988 | TGATCCCATACA (SEQ ID NO: 1988) | RTT |
| 1989 | CTGATCCCATACA (SEQ ID NO: 1989) | RTT |
| 1990 | CCTGATCCCATACA (SEQ ID NO: 1990) | RTT |
| 1991 | GCCTGATCCCATACA (SEQ ID NO: 1991) | RTT |
| 1992 | AGCCTGATCCCATACA (SEQ ID NO: 1992) | RTT |
| 1993 | AAGCCTGATCCCATACA (SEQ ID NO: 1993) | RTT |
| 1994 | GAAGCCTGATCCCATACA (SEQ ID NO: 1994) | RTT |
| 1995 | GGAAGCCTGATCCCATACA (SEQ ID NO: 1995) | RTT |
| 1996 | TGGAAGCCTGATCCCATACA (SEQ ID NO: 1996) | RTT |
| 1997 | GTGGAAGCCTGATCCCATACA (SEQ ID NO: 1997) | RTT |
| 1998 | AGTGGAAGCCTGATCCCATACA (SEQ ID NO: | RTT |
| | 1998) | |
| 1999 | AAGTGGAAGCCTGATCCCATACA (SEQ ID NO: | RTT |
| | 1999) | |
| 2000 | AAAGTGGAAGCCTGATCCCATACA (SEQ ID NO: | RTT |
| | 2000) | |
| 2001 | CAAAGTGGAAGCCTGATCCCATACA (SEQ ID NO: | RTT |
| | 2001) | |
| 2002 | CCAAAGTGGAAGCCTGATCCCATACA (SEQ ID | RTT |
| | NO: 2002) | |
| 2003 | TCCAAAGTGGAAGCCTGATCCCATACA (SEQ ID | RTT |
| | NO: 2003) | |
| 2004 | TTCCAAAGTGGAAGCCTGATCCCATACA (SEQ ID | RTT |
| | NO: 2004) | |
| 2005 | TTTCCAAAGTGGAAGCCTGATCCCATACA (SEQ | RTT |
| | ID NO: 2005) | |
| 2006 | GTTTCCAAAGTGGAAGCCTGATCCCATACA (SEQ | RTT |
| | ID NO: 2006) | |
| 2007 | GGTTTCCAAAGTGGAAGCCTGATCCCATACA | RTT |
| | (SEQ ID NO: 2007) | |
| 2008 | GGGTTTCCAAAGTGGAAGCCTGATCCCATACA | RTT |
| | (SEQ ID NO: 2008) | |
| 2009 | TGGGTTTCCAAAGTGGAAGCCTGATCCCATACA | RTT |
| | (SEQ ID NO: 2009) | |
| 2010 | CTGGGTTTCCAAAGTGGAAGCCTGATCCCATACA | RTT |
| | (SEQ ID NO: 2010) | |
| 2011 | GCTGGGTTTCCAAAGTGGAAGCCTGATCCCATAC | RTT |
| | A (SEQ ID NO: 2011) | |
| 2012 | TGCTGGGTTTCCAAAGTGGAAGCCTGATCCCATA | RTT |
| | CA (SEQ ID NO: 2012) | |
| 2013 | TTGCTGGGTTTCCAAAGTGGAAGCCTGATCCCAT | RTT |
| | ACA (SEQ ID NO: 2013) | |
| 2014 | CTTGCTGGGTTTCCAAAGTGGAAGCCTGATCCCA | RTT |
| | TACA (SEQ ID NO: 2014) | |
| 2015 | TCTTGCTGGGTTTCCAAAGTGGAAGCCTGATCCC | RTT |
| | ATACA (SEQ ID NO: 2015) | |
| 2016 | GTCTTGCTGGGTTTCCAAAGTGGAAGCCTGATCC | RTT |
| | CATACA (SEQ ID NO: 2016) | |
| 480 | AAGGCTTCATACATCTTCCT (SEQ ID NO: 480) | PE3 ngRNA spacer (TAGG PAM) |
| 64 | ACGTGAAGACAGGTGTCTTG (SEQ ID NO: 64) | PE3 ngRNA spacer (CTGG; CTGGGT PAM) |
| 482 | CACTACTTACCATCTCTTTC (SEQ ID NO: 482) | PE3 ngRNA spacer (AAGG PAM) |
| 412 | CAGGTGTCTTGCTGGGTTTC (SEQ ID NO: 412) | PE3 ngRNA spacer (CAAAGT PAM) |
| 203 | CGTGAAGACAGGTGTCTTGC (SEQ ID NO: 203) | PE3 ngRNA spacer (TGGG PAM) |
| 413 | CTGGGTTTCCAAAGTGGAAG (SEQ ID NO: 413) | PE3 ngRNA spacer (CCTGAT PAM) |
| 485 | GGAACTGAGCCACGTGAAGA (SEQ ID NO: 485) | PE3 ngRNA spacer (CAGG PAM) |
| 542 | TACATCTTCCTTAGGAACTC (SEQ ID NO: 542) | PE3 ngRNA spacer (CTGG PAM) |
| 414 | TGGAACTGAGCCACGTGAAG (SEQ ID NO: 414) | PE3 ngRNA spacer (ACAGGT PAM) |
| 543 | TGTCTTGCTGGGTTTCCAAA (SEQ ID NO: 543) | PE3 ngRNA spacer (GTGG PAM) |
| 325 | CGTGAAGACAGGTGTCTTGCGTTTTAGAGCTAGA | PE3 ngRNA (TGGG PAM) |
| | AATAGCAAGTTAAAATAAGGCTAGTCCGTTATCA | |
| | ACTTGAAAAAGTGGCACCGAGTCGGTGC (SEQ ID | |
| | NO: 325) | |
| 333 | GCGTGAAGACAGGTGTCTTGCGTTTTAGAGCTAG | PE3 ngRNA (TGGG PAM),, contains end |
| | AAATAGCAAGTTAAAATAAGGCTAGTCCGTTATC | adaptations |
| | AACTTGAAAAAGTGGCACCGAGTCGGTGCTTTT | |
| | (SEQ ID NO: 333) | |
| 340 | GCGTGAAGACAGGTGTCTTGCGTTTTAGAGCTAG | PE3 ngRNA (TGGG PAM), contains linker |
| | AAATAGCAAGTTAAAATAAGGCTAGTCCGTTATC | sequence AACATTGA; hairpin SEQ ID |
| | AACTTGAAAAAGTGGCACCGAGTCGGTGCAACA | NO: 3591; end adaptations |
| | TTGACGCGTCTCTACGTGGGGGCGCGTTTT (SEQ | |
| | ID NO: 340) | |

TABLE 28

| Sequence | | |
|---|---|---|
| Number | Sequence | Description |
| 2017 | CTTGCTGGGTTTCCAAA (SEQ ID NO: 2017) | PEgRNA spacer (GTGG PAM) |
| 2018 | TCTTGCTGGGTTTCCAAA (SEQ ID NO: 2018) | PEgRNA spacer (GTGG PAM) |
| 2019 | GTCTTGCTGGGTTTCCAAA (SEQ ID NO: 2019) | PEgRNA spacer (GTGG PAM) |
| 543 | TGTCTTGCTGGGTTTCCAAA (SEQ ID NO: 543) | PERNA spacer (GTGG PAM) |
| 2020 | GTGTCTTGCTGGGTTTCCAAA (SEQ ID NO: 2020) | PEgRNA spacer (GTGG PAM) |
| 2021 | GGTGTCTTGCTGGGTTTCCAAA (SEQ ID NO: 2021) | PEgRNA spacer (GTGG PAM) |
| 2022 | GGAAA | PBS |
| 2023 | GGAAAC | PBS |
| 2024 | GGAAACC | PBS |
| 2025 | GGAAACCC | PBS |
| 2026 | GGAAACCCA | PBS |
| 2027 | GGAAACCCAG (SEQ ID NO: 2027) | PBS |
| 2028 | GGAAACCCAGC (SEQ ID NO: 2028) | PBS |
| 2029 | GGAAACCCAGCA (SEQ ID NO: 2029) | PBS |
| 2030 | GGAAACCCAGCAA (SEQ ID NO: 2030) | PBS |
| 2031 | GGAAACCCAGCAAG (SEQ ID NO: 2031) | PBS |
| 2032 | GGAAACCCAGCAAGA (SEQ ID NO: 2032) | PBS |
| 2033 | GGAAACCCAGCAAGAC (SEQ ID NO: 2033) | PBS |
| 2034 | GGAAACCCAGCAAGACA (SEQ ID NO: 2034) | PBS |
| 2035 | GGAAACCCAGCAAGACAC (SEQ ID NO: 2035) | PBS |
| 2036 | GGAAACCCAGCAAGACACC (SEQ ID NO: 2036) | PBS |
| 2037 | GATCAGGCTAGCACTTT (SEQ ID NO: 2037) | RTT*1, 2 (GTGG-to-GTGC PAM silencing |
| | | edit) |
| 2038 | GATCAGGCTAGTACTTT (SEQ ID NO: 2038) | RTT*1, 3 (GTGG-to-GTAC PAM silencing |
| | | edit) |
| 2039 | GATCAGGCTTCAACTTT (SEQ ID NO: 2039) | RTT*1, 4 (GTGG-to-GTTG PAM silencing |
| | | edit) |
| 2040 | GATCAGGCTTCCACTTT (SEQ ID NO: 2040) | RTT*1, 5 |
| 2041 | GATCAGGCTTCGACTTT (SEQ ID NO: 2041) | RTT*1, 6 (GTGG-to-GTCG PAM silencing |
| | | edit) |
| 2042 | GATCAGGCTTCTACTTT (SEQ ID NO: 2042) | RTT*1, 7 (GTGG-to-GTAG PAM silencing |
| | | edit) |
| 2043 | GGATCAGGCTAGCACTTT (SEQ ID NO: 2043) | RTT*1, 2 (GTGG-to-GTGC PAM silencing |
| | | edit) |
| 2044 | GGATCAGGCTAGTACTTT (SEQ ID NO: 2044) | RTT*1, 3 (GTGG-to-GTAC PAM silencing |
| | | edit) |
| 2045 | GGATCAGGCTTCAACTTT (SEQ ID NO: 2045) | RTT*1, 4 (GTGG-to-GTTG PAM silencing |
| | | edit) |
| 2046 | GGATCAGGCTTCCACTTT (SEQ ID NO: 2046) | RTT*1, 5 |
| 2047 | GGATCAGGCTTCGACTTT (SEQ ID NO: 2047) | RTT*1, 6 (GTGG-to-GTCG PAM silencing |
| | | edit) |
| 2048 | GGATCAGGCTTCTACTTT (SEQ ID NO: 2048) | RTT*1, 7 (GTGG-to-GTAG PAM silencing |
| | | edit) |
| 2049 | GGGATCAGGCTAGCACTTT (SEQ ID NO: 2049) | RTT*1, 2 (GTGG-to-GTGC PAM silencing |
| | | edit) |
| 2050 | GGGATCAGGCTAGTACTTT (SEQ ID NO: 2050) | RTT*1, 3 (GTGG-to-GTAC PAM silencing |
| | | edit) |
| 2051 | GGGATCAGGCTTCAACTTT (SEQ ID NO: 2051) | RTT*1, 4 (GTGG-to-GTTG PAM silencing |
| | | edit) |
| 2052 | GGGATCAGGCTTCCACTTT (SEQ ID NO: 2052) | RTT*1, 5 |
| 2053 | GGGATCAGGCTTCGACTTT (SEQ ID NO: 2053) | RTT*1, 6 (GTGG-to-GTCG PAM silencing |
| | | edit) |
| 2054 | GGGATCAGGCTTCTACTTT (SEQ ID NO: 2054) | RTT*1, 7 (GTGG-to-GTAG PAM silencing |
| | | edit) |
| 1821 | TGGGATCAGGCTAGCACTTT (SEQ ID NO: 1821) | RTT*1, 2 (GTGG-to-GTGC PAM silencing |
| | | edit) |
| 1399 | TGGGATCAGGCTAGTACTTT (SEQ ID NO: 1399) | RTT*1, 3 (GTGG-to-GTAC PAM silencing |
| | | edit) |
| 1400 | TGGGATCAGGCTTCAACTTT (SEQ ID NO: 1400) | RTT*1, 4 (GTGG-to-GTTG PAM silencing |
| | | edit) |
| 43 | TGGGATCAGGCTTCCACTTT (SEQ ID NO: 43) | RTT*1, 5 |
| 1401 | TGGGATCAGGCTTCGACTTT (SEQ ID NO: 1401) | RTT*1, 6 (GTGG-to-GTCG PAM silencing |
| | | edit) |
| 1402 | TGGGATCAGGCTTCTACTTT (SEQ ID NO: 1402) | RTT*1, 7 (GTGG-to-GTAG PAM silencing |
| | | edit) |
| 2055 | ATGGGATCAGGCTAGCACTTT (SEQ ID NO: 2055) | RTT*1, 2 (GTGG-to-GTGC PAM silencing |
| | | edit) |
| 2056 | ATGGGATCAGGCTAGTACTTT (SEQ ID NO: 2056) | RTT*1, 3 (GTGG-to-GTAC PAM silencing |
| | | edit) |
| 2057 | ATGGGATCAGGCTTCAACTTT (SEQ ID NO: 2057) | RTT*1, 4 (GTGG-to-GTTG PAM silencing |
| | | edit) |
| 2058 | ATGGGATCAGGCTTCCACTTT (SEQ ID NO: 2058) | RTT*1, 5 |
| 2059 | ATGGGATCAGGCTTCGACTTT (SEQ ID NO: 2059) | RTT*1, 6 (GTGG-to-GTCG PAM silencing |
| | | edit) |
| 2060 | ATGGGATCAGGCTTCTACTTT (SEQ ID NO: 2060) | RTT*1, 7 (GTGG-to-GTAG PAM silencing |
| | | edit) |
| 2061 | TATGGGATCAGGCTAGCACTTT (SEQ ID NO: 2061) | RTT*1, 2 (GTGG-to-GTGC PAM silencing |
| | | edit) |
| 2062 | TATGGGATCAGGCTAGTACTTT (SEQ ID NO: 2062) | RTT*1, 3 (GTGG-to-GTAC PAM silencing |
| | | edit) |
| 2063 | TATGGGATCAGGCTTCAACTTT (SEQ ID NO: 2063) | RTT*1, 4 (GTGG-to-GTTG PAM silencing |
| | | edit) |
| 2064 | TATGGGATCAGGCTTCCACTTT (SEQ ID NO: 2064) | RTT*1, 5 |
| 2065 | TATGGGATCAGGCTTCGACTTT (SEQ ID NO: 2065) | RTT*1, 6 (GTGG-to-GTCG PAM silencing |
| | | edit) |
| 2066 | TATGGGATCAGGCTTCTACTTT (SEQ ID NO: 2066) | RTT*1, 7 (GTGG-to-GTAG PAM silencing |
| | | edit) |
| 2067 | GTATGGGATCAGGCTAGCACTTT (SEQ ID NO: | RTT*1, 2 (GTGG-to-GTGC PAM silencing |
| | 2067) | edit) |
| 2068 | GTATGGGATCAGGCTAGTACTTT (SEQ ID NO: | RTT*1, 3 (GTGG-to-GTAC PAM silencing |
| | 2068) | edit) |
| 2069 | GTATGGGATCAGGCTTCAACTTT (SEQ ID NO: | RTT*1, 4 (GTGG-to-GTTG PAM silencing |
| | 2069) | edit) |
| 2070 | GTATGGGATCAGGCTTCCACTTT (SEQ ID NO: | RTT*1, 5 |
| | 2070) | |
| 2071 | GTATGGGATCAGGCTTCGACTTT (SEQ ID NO: | RTT*1, 6 (GTGG-to-GTCG PAM silencing |
| | 2071) | edit) |
| 2072 | GTATGGGATCAGGCTTCTACTTT (SEQ ID NO: | RTT*1, 7 (GTGG-to-GTAG PAM silencing |
| | 2072) | edit) |
| 2073 | TGTATGGGATCAGGCTAGCACTTT (SEQ ID NO: | RTT*1, 2 (GTGG-to-GTGC PAM silencing |
| | 2073) | edit) |
| 2074 | TGTATGGGATCAGGCTAGTACTTT (SEQ ID NO: | RTT*1, 3 (GTGG-to-GTAC PAM silencing |
| | 2074) | edit) |
| 2075 | TGTATGGGATCAGGCTTCAACTTT (SEQ ID NO: | RTT*1, 4 (GTGG-to-GTTG PAM silencing |
| | 2075) | edit) |
| 2076 | TGTATGGGATCAGGCTTCCACTTT (SEQ ID NO: | RTT*1, 5 |
| | 2076) | |
| 2077 | TGTATGGGATCAGGCTTCGACTTT (SEQ ID NO: | RTT*1, 6 (GTGG-to-GTCG PAM silencing |
| | 2077) | edit) |
| 2078 | TGTATGGGATCAGGCTTCTACTTT (SEQ ID NO: | RTT*1, 7 (GTGG-to-GTAG PAM silencing |
| | 2078) | edit) |
| 2079 | CTGTATGGGATCAGGCTAGCACTTT (SEQ ID NO: | RTT*1, 2 (GTGG-to-GTGC PAM silencing |
| | 2079) | edit) |
| 2080 | CTGTATGGGATCAGGCTAGTACTTT (SEQ ID NO: | RTT*1, 3 (GTGG-to-GTAC PAM silencing |
| | 2080) | edit) |
| 2081 | CTGTATGGGATCAGGCTTCAACTTT (SEQ ID NO: | RTT*1, 4 (GTGG-to-GTTG PAM silencing |
| | 2081) | edit) |
| 2082 | CTGTATGGGATCAGGCTTCCACTTT (SEQ ID NO: | RTT*1, 5 |
| | 2082) | |
| 2083 | CTGTATGGGATCAGGCTTCGACTTT (SEQ ID NO: | RTT*1, 6 (GTGG-to-GTCG PAM silencing |
| | 2083) | edit) |
| 2084 | CTGTATGGGATCAGGCTTCTACTTT (SEQ ID NO: | RTT*1, 7 (GTGG-to-GTAG PAM silencing |
| | 2084) | edit) |
| 2085 | TCTGTATGGGATCAGGCTAGCACTTT (SEQ ID NO: | RTT*1, 2 (GTGG-to-GTGC PAM silencing |
| | 2085) | edit) |
| 2086 | TCTGTATGGGATCAGGCTAGTACTTT (SEQ ID NO: | RTT*1, 3 (GTGG-to-GTAC PAM silencing |
| | 2086) | edit) |
| 2087 | TCTGTATGGGATCAGGCTTCAACTTT (SEQ ID NO: | RTT*1, 4 (GTGG-to-GTTG PAM silencing |
| | 2087) | edit) |
| 2088 | TCTGTATGGGATCAGGCTTCCACTTT (SEQ ID NO: | RTT*1, 5 |
| | 2088) | |
| 2089 | TCTGTATGGGATCAGGCTTCGACTTT (SEQ ID NO: | RTT*1, 6 (GTGG-to-GTCG PAM silencing |
| | 2089) | edit) |
| 2090 | TCTGTATGGGATCAGGCTTCTACTTT (SEQ ID NO: | RTT*1, 7 (GTGG-to-GTAG PAM silencing |
| | 2090) | edit) |
| 2091 | TTCTGTATGGGATCAGGCTAGCACTTT (SEQ ID | RTT*1, 2 (GTGG-to-GTGC PAM silencing |
| | NO: 2091) | edit) |
| 2092 | TTCTGTATGGGATCAGGCTAGTACTTT (SEQ ID | RTT*1, 3 (GTGG-to-GTAC PAM silencing |
| | NO: 2092) | edit) |
| 2093 | TTCTGTATGGGATCAGGCTTCAACTTT (SEQ ID | RTT*1, 4 (GTGG-to-GTTG PAM silencing |
| | NO: 2093) | edit) |
| 2094 | TTCTGTATGGGATCAGGCTTCCACTTT (SEQ ID | RTT*1, 5 |
| | NO: 2094) | |
| 2095 | TTCTGTATGGGATCAGGCTTCGACTTT (SEQ ID | RTT*1, 6 (GTGG-to-GTCG PAM silencing |
| | NO: 2095) | edit) |
| 2096 | TTCTGTATGGGATCAGGCTTCTACTTT (SEQ ID | RTT*1, 7 (GTGG-to-GTAG PAM silencing |
| | NO: 2096) | edit) |
| 2097 | TTTCTGTATGGGATCAGGCTAGCACTTT (SEQ ID | RTT*1, 2 (GTGG-to-GTGC PAM silencing |
| | NO: 2097) | edit) |
| 2098 | TTTCTGTATGGGATCAGGCTAGTACTTT (SEQ ID | RTT*1, 3 (GTGG-to-GTAC PAM silencing |
| | NO: 2098) | edit) |
| 2099 | TTTCTGTATGGGATCAGGCTTCAACTTT (SEQ ID | RTT*1, 4 (GTGG-to-GTTG PAM silencing |
| | NO: 2099) | edit) |
| 2100 | TTTCTGTATGGGATCAGGCTTCCACTTT (SEQ ID | RTT*1, 5 |
| | NO: 2100) | |
| 2101 | TTTCTGTATGGGATCAGGCTTCGACTTT (SEQ ID | RTT*1, 6 (GTGG-to-GTCG PAM silencing |
| | NO: 2101) | edit) |
| 2102 | TTTCTGTATGGGATCAGGCTTCTACTTT (SEQ ID | RTT*1, 7 (GTGG-to-GTAG PAM silencing |
| | NO: 2102) | edit) |
| 2103 | CTTTCTGTATGGGATCAGGCTAGCACTTT (SEQ ID | RTT*1, 2 (GTGG-to-GTGC PAM silencing |
| | NO: 2103) | edit) |
| 2104 | CTTTCTGTATGGGATCAGGCTAGTACTTT (SEQ ID | RTT*1, 3 (GTGG-to-GTAC PAM silencing |
| | NO: 2104) | edit) |
| 2105 | CTTTCTGTATGGGATCAGGCTTCAACTTT (SEQ ID | RTT*1, 4 (GTGG-to-GTTG PAM silencing |
| | NO: 2105) | edit) |
| 2106 | CTTTCTGTATGGGATCAGGCTTCCACTTT (SEQ ID | RTT*1, 5 |
| | NO: 2106) | |
| 2107 | CTTTCTGTATGGGATCAGGCTTCGACTTT (SEQ ID | RTT*1, 6 (GTGG-to-GTCG PAM silencing |
| | NO: 2107) | edit) |
| 2108 | CTTTCTGTATGGGATCAGGCTTCTACTTT (SEQ ID | RTT*1, 7 (GTGG-to-GTAG PAM silencing |
| | NO: 2108) | edit) |
| 2109 | GCTTTCTGTATGGGATCAGGCTAGCACTTT (SEQ | RTT*1, 2 (GTGG-to-GTGC PAM silencing |
| | ID NO: 2109) | edit) |
| 2110 | GCTTTCTGTATGGGATCAGGCTAGTACTTT (SEQ | RTT*1, 3 (GTGG-to-GTAC PAM silencing |
| | ID NO: 2110) | edit) |
| 2111 | GCTTTCTGTATGGGATCAGGCTTCAACTTT (SEQ | RTT*1, 4 (GTGG-to-GTTG PAM silencing |
| | ID NO: 2111) | edit) |
| 2112 | GCTTTCTGTATGGGATCAGGCTTCCACTTT (SEQ | RTT*1, 5 |
| | ID NO: 2112) | |
| 2113 | GCTTTCTGTATGGGATCAGGCTTCGACTTT (SEQ | RTT*1, 6 (GTGG-to-GTCG PAM silencing |
| | ID NO: 2113) | edit) |
| 2114 | GCTTTCTGTATGGGATCAGGCTTCTACTTT (SEQ | RTT*1, 7 (GTGG-to-GTAG PAM silencing |
| | ID NO: 2114) | edit) |
| 2115 | AGCTTTCTGTATGGGATCAGGCTAGCACTTT | RTT*1, 2 (GTGG-to-GTGC PAM silencing |
| | (SEQ ID NO: 2115) | edit) |
| 2116 | AGCTTTCTGTATGGGATCAGGCTAGTACTTT (SEQ | RTT*1, 3 (GTGG-to-GTAC PAM silencing |
| | ID NO: 2116) | edit) |
| 2117 | AGCTTTCTGTATGGGATCAGGCTTCAACTTT (SEQ | RTT*1, 4 (GTGG-to-GTTG PAM silencing |
| | ID NO: 2117) | edit) |
| 2118 | AGCTTTCTGTATGGGATCAGGCTTCCACTTT (SEQ | RTT*1, 5 |
| | ID NO: 2118) | |
| 2119 | AGCTTTCTGTATGGGATCAGGCTTCGACTTT (SEQ | RTT*1, 6 (GTGG-to-GTCG PAM silencing |
| | ID NO: 2119) | edit) |
| 2120 | AGCTTTCTGTATGGGATCAGGCTTCTACTTT (SEQ | RTT*1, 7 (GTGG-to-GTAG PAM silencing |
| | ID NO: 2120) | edit) |
| 2121 | AAGCTTTCTGTATGGGATCAGGCTAGCACTTT | RTT*1, 2 (GTGG-to-GTGC PAM silencing |
| | (SEQ ID NO: 2121) | edit) |
| 2122 | AAGCTTTCTGTATGGGATCAGGCTAGTACTTT | RTT*1, 3 (GTGG-to-GTAC PAM silencing |
| | (SEQ ID NO: 2122) | edit) |
| 2123 | AAGCTTTCTGTATGGGATCAGGCTTCAACTTT | RTT*1, 4 (GTGG-to-GTTG PAM silencing |
| | (SEQ ID NO: 2123) | edit) |
| 2124 | AAGCTTTCTGTATGGGATCAGGCTTCCACTTT | RTT*1, 5 |
| | (SEQ ID NO: 2124) | |
| 2125 | AAGCTTTCTGTATGGGATCAGGCTTCGACTTT | RTT*1, 6 (GTGG-to-GTCG PAM silencing |
| | (SEQ ID NO: 2125) | edit) |
| 2126 | AAGCTTTCTGTATGGGATCAGGCTTCTACTTT | RTT*1, 7 (GTGG-to-GTAG PAM silencing |
| | (SEQ ID NO: 2126) | edit) |
| 2127 | GAAGCTTTCTGTATGGGATCAGGCTAGCACTTT | RTT*1, 2 (GTGG-to-GTGC PAM silencing |
| | (SEQ ID NO: 2127) | edit) |
| 2128 | GAAGCTTTCTGTATGGGATCAGGCTAGTACTTT | RTT*1, 3 (GTGG-to-GTAC PAM silencing |
| | (SEQ ID NO: 2128) | edit) |
| 2129 | GAAGCTTTCTGTATGGGATCAGGCTTCAACTTT | RTT*1, 4 (GTGG-to-GTTG PAM silencing |
| | (SEQ ID NO: 2129) | edit) |
| 2130 | GAAGCTTTCTGTATGGGATCAGGCTTCCACTTT | RTT*1, 5 |
| | (SEQ ID NO: 2130) | |
| 2131 | GAAGCTTTCTGTATGGGATCAGGCTTCGACTTT | RTT*1, 6 (GTGG-to-GTCG PAM silencing |
| | (SEQ ID NO: 2131) | edit) |
| 2132 | GAAGCTTTCTGTATGGGATCAGGCTTCTACTTT | RTT*1, 7 (GTGG-to-GTAG PAM silencing |
| | (SEQ ID NO: 2132) | edit) |
| 2133 | AGAAGCTTTCTGTATGGGATCAGGCTAGCACTTT | RTT*1, 2 (GTGG-to-GTGC PAM silencing |
| | (SEQ ID NO: 2133) | edit) |
| 2134 | AGAAGCTTTCTGTATGGGATCAGGCTAGTACTTT | RTT*1, 3 (GTGG-to-GTAC PAM silencing |
| | (SEQ ID NO: 2134) | edit) |
| 2135 | AGAAGCTTTCTGTATGGGATCAGGCTTCAACTTT | RTT*1, 4 (GTGG-to-GTTG PAM silencing |
| | (SEQ ID NO: 2135) | edit) |
| 2136 | AGAAGCTTTCTGTATGGGATCAGGCTTCCACTTT | RTT*1, 5 |
| | (SEQ ID NO: 2136) | |
| 2137 | AGAAGCTTTCTGTATGGGATCAGGCTTCGACTTT | RTT*1, 6 (GTGG-to-GTCG PAM silencing |
| | (SEQ ID NO: 2137) | edit) |
| 2138 | AGAAGCTTTCTGTATGGGATCAGGCTTCTACTTT | RTT*1, 7 (GTGG-to-GTAG PAM silencing |
| | (SEQ ID NO: 2138) | edit) |
| 2139 | CAGAAGCTTTCTGTATGGGATCAGGCTAGCACTT | RTT*1, 2 (GTGG-to-GTGC PAM silencing |
| | T (SEQ ID NO: 2139) | edit) |
| 2140 | CAGAAGCTTTCTGTATGGGATCAGGCTAGTACTT | RTT*1, 3 (GTGG-to-GTAC PAM silencing |
| | T (SEQ ID NO: 2140) | edit) |
| 2141 | CAGAAGCTTTCTGTATGGGATCAGGCTTCAACTT | RTT*1, 4 (GTGG-to-GTTG PAM silencing |
| | T (SEQ ID NO: 2141) | edit) |
| 2142 | CAGAAGCTTTCTGTATGGGATCAGGCTTCCACTT | RTT*1, 5 |
| | T (SEQ ID NO: 2142) | |
| 2143 | CAGAAGCTTTCTGTATGGGATCAGGCTTCGACTT | RTT*1, 6 (GTGG-to-GTCG PAM silencing |
| | T (SEQ ID NO: 2143) | edit) |
| 2144 | CAGAAGCTTTCTGTATGGGATCAGGCTTCTACTT | RTT*1, 7 (GTGG-to-GTAG PAM silencing |
| | T (SEQ ID NO: 2144) | edit) |
| 2145 | GCAGAAGCTTTCTGTATGGGATCAGGCTAGCACT | RTT*1, 2 (GTGG-to-GTGC PAM silencing |
| | TT (SEQ ID NO: 2145) | edit) |
| 2146 | GCAGAAGCTTTCTGTATGGGATCAGGCTAGTACT | RTT*1, 3 (GTGG-to-GTAC PAM silencing |
| | TT (SEQ ID NO: 2146) | edit) |
| 2147 | GCAGAAGCTTTCTGTATGGGATCAGGCTTCAACT | RTT*1, 4 (GTGG-to-GTTG PAM silencing |
| | TT (SEQ ID NO: 2147) | edit) |
| 2148 | GCAGAAGCTTTCTGTATGGGATCAGGCTTCCACT | RTT*1, 5 |
| | TT (SEQ ID NO: 2148) | |
| 2149 | GCAGAAGCTTTCTGTATGGGATCAGGCTTCGACT | RTT*1, 6 (GTGG-to-GTCG PAM silencing |
| | TT (SEQ ID NO: 2149) | edit) |
| 2150 | GCAGAAGCTTTCTGTATGGGATCAGGCTTCTACT | RTT*1, 7 (GTGG-to-GTAG PAM silencing |
| | TT (SEQ ID NO: 2150) | edit) |
| 2151 | TGCAGAAGCTTTCTGTATGGGATCAGGCTAGCAC | RTT*1, 2 (GTGG-to-GTGC PAM silencing |
| | TTT (SEQ ID NO: 2151) | edit) |
| 2152 | TGCAGAAGCTTTCTGTATGGGATCAGGCTAGTAC | RTT*1, 3 (GTGG-to-GTAC PAM silencing |
| | TTT (SEQ ID NO: 2152) | edit) |
| 2153 | TGCAGAAGCTTTCTGTATGGGATCAGGCTTCAAC | RTT*1, 4 (GTGG-to-GTTG PAM silencing |
| | TTT (SEQ ID NO: 2153) | edit) |
| 2154 | TGCAGAAGCTTTCTGTATGGGATCAGGCTTCCAC | RTT*1, 5 |
| | TTT (SEQ ID NO: 2154) | |
| 2155 | TGCAGAAGCTTTCTGTATGGGATCAGGCTTCGAC | RTT*1, 6 (GTGG-to-GTCG PAM silencing |
| | TTT (SEQ ID NO: 2155) | edit) |
| 2156 | TGCAGAAGCTTTCTGTATGGGATCAGGCTTCTAC | RTT*1, 7 (GTGG-to-GTAG PAM silencing |
| | TTT (SEQ ID NO: 2156) | edit) |
| 2157 | ATGCAGAAGCTTTCTGTATGGGATCAGGCTAGCA | RTT*1, 2 (GTGG-to-GTGC PAM silencing |
| | CTTT (SEQ ID NO: 2157) | edit) |
| 2158 | ATGCAGAAGCTTTCTGTATGGGATCAGGCTAGTA | RTT*1, 3 (GTGG-to-GTAC PAM silencing |
| | CTTT (SEQ ID NO: 2158) | edit) |
| 2159 | ATGCAGAAGCTTTCTGTATGGGATCAGGCTTCAA | RTT*1, 4 (GTGG-to-GTTG PAM silencing |
| | CTTT (SEQ ID NO: 2159) | edit) |
| 2160 | ATGCAGAAGCTTTCTGTATGGGATCAGGCTTCCA | RTT*1, 5 |
| | CTTT (SEQ ID NO: 2160) | |
| 2161 | ATGCAGAAGCTTTCTGTATGGGATCAGGCTTCGA | RTT*1, 6 (GTGG-to-GTCG PAM silencing |
| | CTTT (SEQ ID NO: 2161) | edit) |
| 2162 | ATGCAGAAGCTTTCTGTATGGGATCAGGCTTCTA | RTT*1, 7 (GTGG-to-GTAG PAM silencing |
| | CTTT (SEQ ID NO: 2162) | edit) |
| 2163 | GATGCAGAAGCTTTCTGTATGGGATCAGGCTAGC | RTT*1, 2 (GTGG-to-GTGC PAM silencing |
| | ACTTT (SEQ ID NO: 2163) | edit) |
| 2164 | GATGCAGAAGCTTTCTGTATGGGATCAGGCTAGT | RTT*1, 3 (GTGG-to-GTAC PAM silencing |
| | ACTTT (SEQ ID NO: 2164) | edit) |
| 2165 | GATGCAGAAGCTTTCTGTATGGGATCAGGCTTCA | RTT*1, 4 (GTGG-to-GTTG PAM silencing |
| | ACTTT (SEQ ID NO: 2165) | edit) |
| 2166 | GATGCAGAAGCTTTCTGTATGGGATCAGGCTTCC | RTT*1, 5 |
| | ACTTT (SEQ ID NO: 2166) | |
| 2167 | GATGCAGAAGCTTTCTGTATGGGATCAGGCTTCG | RTT*1, 6 (GTGG-to-GTCG PAM silencing |
| | ACTTT (SEQ ID NO: 2167) | edit) |
| 2168 | GATGCAGAAGCTTTCTGTATGGGATCAGGCTTCT | RTT*1, 7 (GTGG-to-GTAG PAM silencing |
| | ACTTT (SEQ ID NO: 2168) | edit) |
| 2169 | GGATGCAGAAGCTTTCTGTATGGGATCAGGCTAG | RTT*1, 2 (GTGG-to-GTGC PAM silencing |
| | CACTTT (SEQ ID NO: 2169) | edit) |
| 2170 | GGATGCAGAAGCTTTCTGTATGGGATCAGGCTAG | RTT*1, 3 (GTGG-to-GTAC PAM silencing |
| | TACTTT (SEQ ID NO: 2170) | edit) |
| 2171 | GGATGCAGAAGCTTTCTGTATGGGATCAGGCTTC | RTT*1, 4 (GTGG-to-GTTG PAM silencing |
| | AACTTT (SEQ ID NO: 2171) | edit) |
| 2172 | GGATGCAGAAGCTTTCTGTATGGGATCAGGCTTC | RTT*1, 5 |
| | CACTTT (SEQ ID NO: 2172) | |
| 2173 | GGATGCAGAAGCTTTCTGTATGGGATCAGGCTTC | RTT*1, 6 (GTGG-to-GTCG PAM silencing |
| | GACTTT (SEQ ID NO: 2173) | edit) |
| 2174 | GGATGCAGAAGCTTTCTGTATGGGATCAGGCTTC | RTT*1, 7 (GTGG-to-GTAG PAM silencing |
| | TACTTT (SEQ ID NO: 2174) | edit) |
| 126 | ACCTTTTCGCTTTTTCCAAG (SEQ ID NO: 126) | PE3 ngRNA spacer (ATGG PAM) |
| 127 | AGAAGCTTTCTGTATGGGAT (SEQ ID NO: 127) | PE3b*1 ngRNA spacer (CAGG PAM) |
| 131 | CTTTCTTGTGATTATCAGTT (SEQ ID NO: 131) | PE3 ngRNA spacer (TTGG PAM) |
| 1227 | GTGCTGGACAGGCTGCTGTG (SEQ ID NO: 1227) | PE3 ngRNA spacer (AAGG PAM) |
| 1759 | TATGGGATCAGGCTAGCACT (SEQ ID NO: 1759) | PE3b*2 ngRNA spacer (TTGG PAM) |
| 1760 | TATGGGATCAGGCTAGTACT (SEQ ID NO: 1760) | PE3b*3 ngRNA spacer (TTGG PAM) |
| 2175 | TATGGGATCAGGCTTCAACT (SEQ ID NO: 2175) | PE3b*4 ngRNA spacer (TTGG PAM) |
| 132 | TATGGGATCAGGCTTCCACT (SEQ ID NO: 132) | PE3b*5 ngRNA spacer (TTGG PAM) |
| 2176 | TATGGGATCAGGCTTCGACT (SEQ ID NO: 2176) | PE3b*6 ngRNA spacer (TTGG PAM) |
| 2177 | TATGGGATCAGGCTTCTACT (SEQ ID NO: 2177) | PE3b*7 ngRNA spacer (TTGG PAM) |
| 1113 | TGCTGGACAGGCTGCTGTGA (SEQ ID NO: 1113) | PE3 ngRNA spacer (AGGG PAM) |
| 134 | TGGATGCAGAAGCTTTCTGT (SEQ ID NO: 134) | PE3 ngRNA spacer (ATGG PAM) |

TABLE 29

| Sequence | | |
|---|---|---|
| Number | Sequence | Description |
| 2178 | TCAGTTTTGGATGCAGA (SEQ ID NO: 2178) | PEgRNA spacer (AG PAM) |
| 2179 | ATCAGTTTTGGATGCAGA (SEQ ID NO: 2179) | PEgRNA spacer (AG PAM) |
| 2180 | TATCAGTTTTGGATGCAGA (SEQ ID NO: 2180) | PEgRNA spacer (AG PAM) |
| 44 | TTATCAGTTTTGGATGCAGA (SEQ ID NO: 44) | PERNA spacer (AG PAM) |
| 2181 | ATTATCAGTTTTGGATGCAGA (SEQ ID NO: 2181) | PEgRNA spacer (AG PAM) |
| 2182 | GATTATCAGTTTTGGATGCAGA (SEQ ID NO: 2182) | PEgRNA spacer (AG PAM) |
| 2183 | GCATC | PBS |
| 2184 | GCATCC | PBS |
| 2185 | GCATCCA | PBS |
| 2186 | GCATCCAA | PBS |
| 2187 | GCATCCAAA | PBS |
| 2188 | GCATCCAAAA (SEQ ID NO: 2188) | PBS |
| 2189 | GCATCCAAAAC (SEQ ID NO: 2189) | PBS |
| 2190 | GCATCCAAAACT (SEQ ID NO: 2190) | PBS |
| 2191 | GCATCCAAAACTG (SEQ ID NO: 2191) | PBS |
| 2192 | GCATCCAAAACTGA (SEQ ID NO: 2192) | PBS |
| 2193 | GCATCCAAAACTGAT (SEQ ID NO: 2193) | PBS |
| 2194 | GCATCCAAAACTGATA (SEQ ID NO: 2194) | PBS |
| 2195 | GCATCCAAAACTGATAA (SEQ ID NO: 2195) | PBS |
| 2196 | GCATCCAAAACTGATAAT (SEQ ID NO: 2196) | PBS |
| 2197 | GCATCCAAAACTGATAATC (SEQ ID NO: 2197) | PBS |
| 2198 | CCCATACAGAAAGCTTCT (SEQ ID NO: 2198) | RTT*1, 2, 4 |
| 2199 | CCCATACAGAAAGTTTCT (SEQ ID NO: 2199) | RTT*1, 3, 4 (AG-to-AA PAM silencing edit) |
| 2200 | TCCCATACAGAAAGCTTCT (SEQ ID NO: 2200) | RTT*1, 2, 4 |
| 2201 | TCCCATACAGAAAGTTTCT (SEQ ID NO: 2201) | RTT*1, 3, 4 (AG-to-AA PAM silencing edit) |
| 2202 | ATCCCATACAGAAAGCTTCT (SEQ ID NO: 2202) | RTT*1, 2, 4 |
| 2203 | ATCCCATACAGAAAGTTTCT (SEQ ID NO: 2203) | RTT*1, 3, 4 (AG-to-AA PAM silencing edit) |
| 2204 | GATCCCATACAGAAAGCTTCT (SEQ ID NO: 2204) | RTT*1, 2, 4 |
| 2205 | GATCCCATACAGAAAGTTTCT (SEQ ID NO: 2205) | RTT*1, 3, 4 (AG-to-AA PAM silencing edit) |
| 2206 | TGATCCCATACAGAAAGCTTCT (SEQ ID NO: 2206) | RTT*1, 2, 4 |
| 2207 | TGATCCCATACAGAAAGTTTCT (SEQ ID NO: 2207) | RTT*1, 3, 4 (AG-to-AA PAM silencing edit) |
| 2208 | CTGATCCCATACAGAAAGCTTCT (SEQ ID NO: | RTT*1, 2, 4 |
| | 2208) | |
| 2209 | CTGATCCCATACAGAAAGTTTCT (SEQ ID NO: | RTT*1, 3, 4 (AG-to-AA PAM silencing edit) |
| | 2209) | |
| 2210 | CCTGATCCCATACAGAAAGCTTCT (SEQ ID NO: | RTT*1, 2, 4 |
| | 2210) | |
| 2211 | CCTGATCCCATACAGAAAGTTTCT (SEQ ID NO: | RTT*1, 3, 4 (AG-to-AA PAM silencing edit) |
| | 2211) | |
| 2212 | GCCTGATCCCATACAGAAAGCTTCT (SEQ ID NO: | RTT*1, 2, 4 |
| | 2212) | |
| 2213 | GCCTGATCCCATACAGAAAGTTTCT (SEQ ID NO: | RTT*1, 3, 4 (AG-to-AA PAM silencing edit) |
| | 2213) | |
| 2214 | AGCCTGATCCCATACAGAAAGCTTCT (SEQ ID | RTT*1, 2, 4 |
| | NO: 2214) | |
| 2215 | AGCCTGATCCCATACAGAAAGTTTCT (SEQ ID | RTT*1, 3, 4 (AG-to-AA PAM silencing edit) |
| | NO: 2215) | |
| 2216 | AAGCCTGATCCCATACAGAAAGCTTCT (SEQ ID | RTT*1, 2, 4 |
| | NO: 2216) | |
| 2217 | AAGCCTGATCCCATACAGAAAGTTTCT (SEQ ID | RTT*1, 3, 4 (AG-to-AA PAM silencing edit) |
| | NO: 2217) | |
| 2218 | GAAGCCTGATCCCATACAGAAAGCTTCT (SEQ ID | RTT*1, 2, 4 |
| | NO: 2218) | |
| 2219 | GAAGCCTGATCCCATACAGAAAGTTTCT (SEQ ID | RTT*1, 3, 4 (AG-to-AA PAM silencing edit) |
| | NO: 2219) | |
| 2220 | GGAAGCCTGATCCCATACAGAAAGCTTCT (SEQ | RTT*1, 2, 4 |
| | ID NO: 2220) | |
| 2221 | GGAAGCCTGATCCCATACAGAAAGTTTCT (SEQ | RTT*1, 3, 4 (AG-to-AA PAM silencing edit) |
| | ID NO: 2221) | |
| 2222 | TGGAAGCCTGATCCCATACAGAAAGCTTCT (SEQ | RTT*1, 2, 4 |
| | ID NO: 2222) | |
| 2223 | TGGAAGCCTGATCCCATACAGAAAGTTTCT (SEQ | RTT*1, 3, 4 (AG-to-AA PAM silencing edit) |
| | ID NO: 2223) | |
| 2224 | GTGGAAGCCTGATCCCATACAGAAAGCTTCT | RTT*1, 2, 4 |
| | (SEQ ID NO: 2224) | |
| 2225 | GTGGAAGCCTGATCCCATACAGAAAGTTTCT | RTT*1, 3, 4 (AG-to-AA PAM silencing edit) |
| | (SEQ ID NO: 2225) | |
| 2226 | AGTGGAAGCCTGATCCCATACAGAAAGCTTCT | RTT*1, 2, 4 |
| | (SEQ ID NO: 2226) | |
| 2227 | AGTGGAAGCCTGATCCCATACAGAAAGTTTCT | RTT*1, 3, 4 (AG-to-AA PAM silencing edit) |
| | (SEQ ID NO: 2227) | |
| 2228 | AAGTGGAAGCCTGATCCCATACAGAAAGCTTCT | RTT*1, 2, 4 |
| | (SEQ ID NO: 2228) | |
| 2229 | AAGTGGAAGCCTGATCCCATACAGAAAGTTTCT | RTT*1, 3, 4 (AG-to-AA PAM silencing edit) |
| | (SEQ ID NO: 2229) | |
| 2230 | AAAGTGGAAGCCTGATCCCATACAGAAAGCTTC | RTT*1, 2, 4 |
| | T (SEQ ID NO: 2230) | |
| 2231 | AAAGTGGAAGCCTGATCCCATACAGAAAGTTTCT | RTT*1, 3, 4 (AG-to-AA PAM silencing edit) |
| | (SEQ ID NO: 2231) | |
| 2232 | CAAAGTGGAAGCCTGATCCCATACAGAAAGCTT | RTT*1, 2, 4 |
| | CT (SEQ ID NO: 2232) | |
| 2233 | CAAAGTGGAAGCCTGATCCCATACAGAAAGTTT | RTT*1, 3, 4 (AG-to-AA PAM silencing edit) |
| | CT (SEQ ID NO: 2233) | |
| 2234 | CCAAAGTGGAAGCCTGATCCCATACAGAAAGCT | RTT*1, 2, 4 |
| | TCT (SEQ ID NO: 2234) | |
| 2235 | CCAAAGTGGAAGCCTGATCCCATACAGAAAGTT | RTT*1, 3, 4 (AG-to-AA PAM silencing edit) |
| | TCT (SEQ ID NO: 2235) | |
| 2236 | TCCAAAGTGGAAGCCTGATCCCATACAGAAAGC | RTT*1, 2, 4 |
| | TTCT (SEQ ID NO: 2236) | |
| 2237 | TCCAAAGTGGAAGCCTGATCCCATACAGAAAGT | RTT*1, 3, 4 (AG-to-AA PAM silencing edit) |
| | TTCT (SEQ ID NO: 2237) | |
| 2238 | TTCCAAAGTGGAAGCCTGATCCCATACAGAAAG | RTT*1, 2, 4 |
| | CTTCT (SEQ ID NO: 2238) | |
| 2239 | TTCCAAAGTGGAAGCCTGATCCCATACAGAAAG | RTT*1, 3, 4 (AG-to-AA PAM silencing edit) |
| | TTTCT (SEQ ID NO: 2239) | |
| 2240 | TTTCCAAAGTGGAAGCCTGATCCCATACAGAAA | RTT*1, 2, 4 |
| | GCTTCT (SEQ ID NO: 2240) | |
| 2241 | TTTCCAAAGTGGAAGCCTGATCCCATACAGAAA | RTT*1, 3, 4 (AG-to-AA PAM silencing edit) |
| | GTTTCT (SEQ ID NO: 2241) | |
| 2242 | GTTTCCAAAGTGGAAGCCTGATCCCATACAGAA | RTT*1, 2, 4 |
| | AGCTTCT (SEQ ID NO: 2242) | |
| 2243 | GTTTCCAAAGTGGAAGCCTGATCCCATACAGAA | RTT*1, 3, 4 (AG-to-AA PAM silencing edit) |
| | AGTTTCT (SEQ ID NO: 2243) | |
| 4 | AACTGAGCCACGTGAAGACA (SEQ ID NO: 4) | PE3 ngRNA spacer (GG PAM) |
| 382 | AAGCCTGATCCCATACAGAA (SEQ ID NO: 382) | PE3b*1 ngRNA spacer (AG PAM) |
| 195 | ACATCTTCCTTAGGAACTCC (SEQ ID NO: 195) | PE3 ngRNA spacer (TG PAM) |
| 196 | ACTACTTACCATCTCTTTCA (SEQ ID NO: 196) | PE3 ngRNA spacer (AG PAM) |
| 197 | ACTCCTGGAACTGAGCCACG (SEQ ID NO: 197) | PE3 ngRNA spacer (TG PAM) |
| 199 | AGGCTTCATACATCTTCCTT (SEQ ID NO: 199) | PE3 ngRNA spacer (AG PAM) |
| 200 | CATCTTCCTTAGGAACTCCT (SEQ ID NO: 200) | PE3 ngRNA spacer (GG PAM) |
| 201 | CCACGTGAAGACAGGTGTCT (SEQ ID NO: 201) | PE3 ngRNA spacer (TG PAM) |
| 202 | CCTGGAACTGAGCCACGTGA (SEQ ID NO: 202) | PE3 ngRNA spacer (AG PAM) |
| 203 | CGTGAAGACAGGTGTCTTGC (SEQ ID NO: 203) | PE3 ngRNA spacer (TG PAM) |
| 204 | CTACTTACCATCTCTTTCAA (SEQ ID NO: 204) | PE3 ngRNA spacer (GG PAM) |
| 205 | CTGAGCCACGTGAAGACAGG (SEQ ID NO: 205) | PE3 ngRNA spacer (TG PAM) |
| 206 | CTTAGGAACTCCTGGAACTG (SEQ ID NO: 206) | PE3 ngRNA spacer (AG PAM) |
| 208 | GAACTCCTGGAACTGAGCCA (SEQ ID NO: 208) | PE3 ngRNA spacer (CG PAM) |
| 209 | GAACTGAGCCACGTGAAGAC (SEQ ID NO: 209) | PE3 ngRNA spacer (AG PAM) |
| 383 | GATCCCATACAGAAAGCTTC (SEQ ID NO: 383) | PE3b*2 ngRNA spacer (TG PAM) |
| 2244 | GATCCCATACAGAAAGTTTC (SEQ ID NO: 2244) | PE3b*3 ngRNA spacer (TG PAM) |
| 210 | GGCTTCATACATCTTCCTTA (SEQ ID NO: 210) | PE3 ngRNA spacer (GG PAM) |
| 211 | GGGTTTCCAAAGTGGAAGCC (SEQ ID NO: 211) | PE3 ngRNA spacer (TG PAM) |
| 212 | GTCTTGCTGGGTTTCCAAAG (SEQ ID NO: 212) | PE3 ngRNA spacer (TG PAM) |
| 213 | GTGAAGACAGGTGTCTTGCT (SEQ ID NO: 213) | PE3 ngRNA spacer (GG PAM) |
| 384 | GTGGAAGCCTGATCCCATAC (SEQ ID NO: 384) | PE3b*4 ngRNA spacer (AG PAM) |
| 214 | GTGTCTTGCTGGGTTTCCAA (SEQ ID NO: 214) | PE3 ngRNA spacer (AG PAM) |
| 215 | TCCTTAGGAACTCCTGGAAC (SEQ ID NO: 215) | PE3 ngRNA spacer (TG PAM) |
| 216 | TCTTGCTGGGTTTCCAAAGT (SEQ ID NO: 216) | PE3 ngRNA spacer (GG PAM) |
| 217 | TGAAGACAGGTGTCTTGCTG (SEQ ID NO: 217) | PE3 ngRNA spacer (GG PAM) |
| 218 | TGCTGGGTTTCCAAAGTGGA (SEQ ID NO: 218) | PE3 ngRNA spacer (AG PAM) |
| 323 | GTCTTGCTGGGTTTCCAAAGGTTTTAGAGCTAGA | PE3 ngRNA (TG PAM) |
| | AATAGCAAGTTAAAATAAGGCTAGTCCGTTATCA | |
| | ACTTGAAAAAGTGGCACCGAGTCGGTGC (SEQ ID | |
| | NO: 323) | |
| 324 | GTGAAGACAGGTGTCTTGCTGTTTTAGAGCTAGA | PE3 ngRNA (GG PAM) |
| | AATAGCAAGTTAAAATAAGGCTAGTCCGTTATCA | |
| | ACTTGAAAAAGTGGCACCGAGTCGGTGC (SEQ ID | |
| | NO: 324) | |
| 325 | CGTGAAGACAGGTGTCTTGCGTTTTAGAGCTAGA | PE3 ngRNA (TG PAM) |
| | AATAGCAAGTTAAAATAAGGCTAGTCCGTTATCA | |
| | ACTTGAAAAAGTGGCACCGAGTCGGTGC (SEQ ID | |
| | NO: 325) | |
| 326 | GAACTGAGCCACGTGAAGACGTTTTAGAGCTAG | PE3 ngRNA (AG PAM) |
| | AAATAGCAAGTTAAAATAAGGCTAGTCCGTTATC | |
| | AACTTGAAAAAGTGGCACCGAGTCGGTGC (SEQ | |
| | ID NO: 326) | |
| 327 | ACATCTTCCTTAGGAACTCCGTTTTAGAGCTAGA | PE3 ngRNA (TG PAM) |
| | AATAGCAAGTTAAAATAAGGCTAGTCCGTTATCA | |
| | ACTTGAAAAAGTGGCACCGAGTCGGTGC (SEQ ID | |
| | NO: 327) | |
| 328 | AGGCTTCATACATCTTCCTTGTTTTAGAGCTAGA | PE3 ngRNA (AG PAM) |
| | AATAGCAAGTTAAAATAAGGCTAGTCCGTTATCA | |
| | ACTTGAAAAAGTGGCACCGAGTCGGTGC (SEQ ID | |
| | NO: 328) | |
| 329 | ACTACTTACCATCTCTTTCAGTTTTAGAGCTAGA | PE3 ngRNA (AG PAM) |
| | AATAGCAAGTTAAAATAAGGCTAGTCCGTTATCA | |
| | ACTTGAAAAAGTGGCACCGAGTCGGTGC (SEQ ID | |
| | NO: 329) | |
| 330 | GTCTTGCTGGGTTTCCAAAGGTTTTAGAGCTAGA | PE3 ngRNA (TG PAM), contains end |
| | AATAGCAAGTTAAAATAAGGCTAGTCCGTTATCA | adaptations |
| | ACTTGAAAAAGTGGCACCGAGTCGGTGCTTTT | |
| | (SEQ ID NO: 330) | |
| 331 | GTGAAGACAGGTGTCTTGCTGTTTTAGAGCTAGA | PE3 ngRNA (GG PAM), contains end |
| | AATAGCAAGTTAAAATAAGGCTAGTCCGTTATCA | adaptations |
| | ACTTGAAAAAGTGGCACCGAGTCGGTGCTTTT | |
| | (SEQ ID NO: 331) | |
| 332 | GAACTGAGCCACGTGAAGACGTTTTAGAGCTAG | PE3 ngRNA (AG PAM), contains end |
| | AAATAGCAAGTTAAAATAAGGCTAGTCCGTTATC | adaptations |
| | AACTTGAAAAAGTGGCACCGAGTCGGTGCTTTT | |
| | (SEQ ID NO: 332) | |
| 333 | GCGTGAAGACAGGTGTCTTGCGTTTTAGAGCTAG | PE3 ngRNA (TG PAM), contains end |
| | AAATAGCAAGTTAAAATAAGGCTAGTCCGTTATC | adaptations |
| | AACTTGAAAAAGTGGCACCGAGTCGGTGCTTTT | |
| | (SEQ ID NO: 333) | |
| 334 | GACATCTTCCTTAGGAACTCCGTTTTAGAGCTAG | PE3 ngRNA (TG PAM), contains end |
| | AAATAGCAAGTTAAAATAAGGCTAGTCCGTTATC | adaptations |
| | AACTTGAAAAAGTGGCACCGAGTCGGTGCTTTT | |
| | (SEQ ID NO: 334) | |
| 335 | GAGGCTTCATACATCTTCCTTGTTTTAGAGCTAG | PE3 ngRNA (AG PAM), contains end |
| | AAATAGCAAGTTAAAATAAGGCTAGTCCGTTATC | adaptations |
| | AACTTGAAAAAGTGGCACCGAGTCGGTGCTTTT | |
| | (SEQ ID NO: 335) | |
| 336 | GACTACTTACCATCTCTTTCAGTTTTAGAGCTAG | PE3 ngRNA (AG PAM), contains end |
| | AAATAGCAAGTTAAAATAAGGCTAGTCCGTTATC | adaptations |
| | AACTTGAAAAAGTGGCACCGAGTCGGTGCTTTT | |
| | (SEQ ID NO: 336) | |
| 337 | GTCTTGCTGGGTTTCCAAAGGTTTTAGAGCTAGA | PE3 ngRNA (TG PAM), contains linker |
| | AATAGCAAGTTAAAATAAGGCTAGTCCGTTATCA | sequence AACATTGA; hairpin SEQ ID |
| | ACTTGAAAAAGTGGCACCGAGTCGGTGCAACAT | NO: 3591; end adaptations |
| | TGACGCGTCTCTACGTGGGGGCGCGTTTT (SEQ | |
| | ID NO: 337) | |
| 338 | GTGAAGACAGGTGTCTTGCTGTTTTAGAGCTAGA | PE3 ngRNA (GG PAM), contains linker |
| | AATAGCAAGTTAAAATAAGGCTAGTCCGTTATCA | sequence AACATTGA; hairpin SEQ ID |
| | ACTTGAAAAAGTGGCACCGAGTCGGTGCAACAT | NO: 3591; end adaptations |
| | TGACGCGTCTCTACGTGGGGGCGCGTTTT (SEQ | |
| | ID NO: 338) | |
| 339 | GAACTGAGCCACGTGAAGACGTTTTAGAGCTAG | PE3 ngRNA (AG PAM), contains linker |
| | AAATAGCAAGTTAAAATAAGGCTAGTCCGTTATC | sequence AACATTGA; hairpin SEQ ID |
| | AACTTGAAAAAGTGGCACCGAGTCGGTGCAACA | NO: 3591; end adaptations |
| | TTGACGCGTCTCTACGTGGGGGCGCGTTTT (SEQ | |
| | ID NO: 339) | |
| 340 | GCGTGAAGACAGGTGTCTTGCGTTTTAGAGCTAG | PE3 ngRNA (TG PAM), contains linker |
| | AAATAGCAAGTTAAAATAAGGCTAGTCCGTTATC | sequence AACATTGA; hairpin SEQ ID |
| | AACTTGAAAAAGTGGCACCGAGTCGGTGCAACA | NO: 3591; end adaptations |
| | TTGACGCGTCTCTACGTGGGGGCGCGTTTT (SEQ | |
| | ID NO: 340) | |
| 341 | GACATCTTCCTTAGGAACTCCGTTTTAGAGCTAG | PE3 ngRNA (TG PAM), contains linker |
| | AAATAGCAAGTTAAAATAAGGCTAGTCCGTTATC | sequence AACATTGA; hairpin SEQ ID |
| | AACTTGAAAAAGTGGCACCGAGTCGGTGCAACA | NO: 3591; end adaptations |
| | TTGACGCGTCTCTACGTGGGGGCGCGTTTT (SEQ | |
| | ID NO: 341) | |
| 342 | GAGGCTTCATACATCTTCCTTGTTTTAGAGCTAG | PE3 ngRNA (AG PAM), contains linker |
| | AAATAGCAAGTTAAAATAAGGCTAGTCCGTTATC | sequence AACATTGA; hairpin SEQ ID |
| | AACTTGAAAAAGTGGCACCGAGTCGGTGCAACA | NO: 3591; end adaptations |
| | TTGACGCGTCTCTACGTGGGGGCGCGTTTT (SEQ | |
| | ID NO: 342) | |
| 343 | GACTACTTACCATCTCTTTCAGTTTTAGAGCTAG | PE3 ngRNA (AG PAM), contains linker |
| | AAATAGCAAGTTAAAATAAGGCTAGTCCGTTATC | sequence AACATTGA; hairpin SEQ ID |
| | AACTTGAAAAAGTGGCACCGAGTCGGTGCAACA | NO: 3591; end adaptations |
| | TTGACGCGTCTCTACGTGGGGGCGCGTTTT (SEQ | |
| | ID NO: 343) | |

TABLE 30

| Sequence | | |
|---|---|---|
| Number | Sequence | Description |
| 2245 | TTGTGATTATCAGTTTT (SEQ ID NO: 2245) | PEgRNA spacer (GG; GGA PAM) |
| 2246 | CTTGTGATTATCAGTTTT (SEQ ID NO: 2246) | PEgRNA spacer (GG; GGA PAM) |
| 2247 | TCTTGTGATTATCAGTTTT (SEQ ID NO: 2247) | PERNA spacer (GG; GGA PAM) |
| 45 | TTCTTGTGATTATCAGTTTT (SEQ ID NO: 45) | PEgRNA spacer (GG; GGA PAM) |
| 2248 | TTTCTTGTGATTATCAGTTTT (SEQ ID NO: 2248) | PEgRNA spacer (GG; GGA PAM) |
| 2249 | CTTTCTTGTGATTATCAGTTTT (SEQ ID NO: 2249) | PEgRNA spacer (GG; GGA PAM) |
| 2250 | ACTGA | PBS |
| 2251 | ACTGAT | PBS |
| 2252 | ACTGATA | PBS |
| 2253 | ACTGATAA | PBS |
| 2254 | ACTGATAAT | PBS |
| 2255 | ACTGATAATC (SEQ ID NO: 2255) | PBS |
| 2256 | ACTGATAATCA (SEQ ID NO: 2256) | PBS |
| 2257 | ACTGATAATCAC (SEQ ID NO: 2257) | PBS |
| 2258 | ACTGATAATCACA (SEQ ID NO: 2258) | PBS |
| 2259 | ACTGATAATCACAA (SEQ ID NO: 2259) | PBS |
| 2260 | ACTGATAATCACAAG (SEQ ID NO: 2260) | PBS |
| 2261 | ACTGATAATCACAAGA (SEQ ID NO: 2261) | PBS |
| 2262 | ACTGATAATCACAAGAA (SEQ ID NO: 2262) | PBS |
| 2263 | ACTGATAATCACAAGAAA (SEQ ID NO: 2263) | PBS |
| 2264 | ACTGATAATCACAAGAAAG (SEQ ID NO: 2264) | PBS |
| 2265 | CCCATACAGAAAGCTTCTGCATCCAAA (SEQ ID | RTT |
| | NO: 2265) | |
| 2266 | TCCCATACAGAAAGCTTCTGCATCCAAA (SEQ ID | RTT |
| | NO: 2266) | |
| 2267 | ATCCCATACAGAAAGCTTCTGCATCCAAA (SEQ | RTT |
| | ID NO: 2267) | |
| 2268 | GATCCCATACAGAAAGCTTCTGCATCCAAA (SEQ | RTT |
| | ID NO: 2268) | |
| 2269 | TGATCCCATACAGAAAGCTTCTGCATCCAAA | RTT |
| | (SEQ ID NO: 2269) | |
| 2270 | CTGATCCCATACAGAAAGCTTCTGCATCCAAA | RTT |
| | (SEQ ID NO: 2270) | |
| 2271 | CCTGATCCCATACAGAAAGCTTCTGCATCCAAA | RTT |
| | (SEQ ID NO: 2271) | |
| 2272 | GCCTGATCCCATACAGAAAGCTTCTGCATCCAAA | RTT |
| | (SEQ ID NO: 2272) | |
| 2273 | AGCCTGATCCCATACAGAAAGCTTCTGCATCCAA | RTT |
| | A (SEQ ID NO: 2273) | |
| 2274 | AAGCCTGATCCCATACAGAAAGCTTCTGCATCCA | RTT |
| | AA (SEQ ID NO: 2274) | |
| 2275 | GAAGCCTGATCCCATACAGAAAGCTTCTGCATCC | RTT |
| | AAA (SEQ ID NO: 2275) | |
| 2276 | GGAAGCCTGATCCCATACAGAAAGCTTCTGCATC | RTT |
| | CAAA (SEQ ID NO: 2276) | |
| 2277 | TGGAAGCCTGATCCCATACAGAAAGCTTCTGCAT | RTT |
| | CCAAA (SEQ ID NO: 2277) | |
| 2278 | GTGGAAGCCTGATCCCATACAGAAAGCTTCTGC | RTT |
| | ATCCAAA (SEQ ID NO: 2278) | |
| 380 | AAAGCTTCTGCATCCAAAAC (SEQ ID NO: 380) | PE3 ngRNA spacer (TG; TGA PAM) |
| 4 | AACTGAGCCACGTGAAGACA (SEQ ID NO: 4) | PE3 ngRNA spacer (GG PAM) |
| 382 | AAGCCTGATCCCATACAGAA (SEQ ID NO: 382) | PE3b ngRNA spacer (AG PAM) |
| 195 | ACATCTTCCTTAGGAACTCC (SEQ ID NO: 195) | PE3 ngRNA spacer (TG PAM) |
| 196 | ACTACTTACCATCTCTTTCA (SEQ ID NO: 196) | PE3 ngRNA spacer (AG PAM) |
| 197 | ACTCCTGGAACTGAGCCACG (SEQ ID NO: 197) | PE3 ngRNA spacer (TG; TGA PAM) |
| 199 | AGGCTTCATACATCTTCCTT (SEQ ID NO: 199) | PE3 ngRNA spacer (AG PAM) |
| 200 | CATCTTCCTTAGGAACTCCT (SEQ ID NO: 200) | PE3 ngRNA spacer (GG; GGA PAM) |
| 201 | CCACGTGAAGACAGGTGTCT (SEQ ID NO: 201) | PE3 ngRNA spacer (TG PAM) |
| 202 | CCTGGAACTGAGCCACGTGA (SEQ ID NO: 202) | PE3 ngRNA spacer (AG; AGA PAM) |
| 203 | CGTGAAGACAGGTGTCTTGC (SEQ ID NO: 203) | PE3 ngRNA spacer (TG PAM) |
| 204 | CTACTTACCATCTCTTTCAA (SEQ ID NO: 204) | PE3 ngRNA spacer (GG PAM) |
| 205 | CTGAGCCACGTGAAGACAGG (SEQ ID NO: 205) | PE3 ngRNA spacer (TG PAM) |
| 206 | CTTAGGAACTCCTGGAACTG (SEQ ID NO: 206) | PE3 ngRNA spacer (AG PAM) |
| 208 | GAACTCCTGGAACTGAGCCA (SEQ ID NO: 208) | PE3 ngRNA spacer (CG PAM) |
| 209 | GAACTGAGCCACGTGAAGAC (SEQ ID NO: 209) | PE3 ngRNA spacer (AG PAM) |
| 383 | GATCCCATACAGAAAGCTTC (SEQ ID NO: 383) | PE3b ngRNA spacer (TG PAM) |
| 210 | GGCTTCATACATCTTCCTTA (SEQ ID NO: 210) | PE3 ngRNA spacer (GG; GGA PAM) |
| 211 | GGGTTTCCAAAGTGGAAGCC (SEQ ID NO: 211) | PE3 ngRNA spacer (TG; TGA PAM) |
| 212 | GTCTTGCTGGGTTTCCAAAG (SEQ ID NO: 212) | PE3 ngRNA spacer (TG PAM) |
| 213 | GTGAAGACAGGTGTCTTGCT (SEQ ID NO: 213) | PE3 ngRNA spacer (GG PAM) |
| 384 | GTGGAAGCCTGATCCCATAC (SEQ ID NO: 384) | PE3b ngRNA spacer (AG; AGA PAM) |
| 214 | GTGTCTTGCTGGGTTTCCAA (SEQ ID NO: 214) | PE3 ngRNA spacer (AG PAM) |
| 215 | TCCTTAGGAACTCCTGGAAC (SEQ ID NO: 215) | PE3 ngRNA spacer (TG; TGA PAM) |
| 216 | TCTTGCTGGGTTTCCAAAGT (SEQ ID NO: 216) | PE3 ngRNA spacer (GG; GGA PAM) |
| 217 | TGAAGACAGGTGTCTTGCTG (SEQ ID NO: 217) | PE3 ngRNA spacer (GG PAM) |
| 218 | TGCTGGGTTTCCAAAGTGGA (SEQ ID NO: 218) | PE3 ngRNA spacer (AG PAM) |
| 323 | GTCTTGCTGGGTTTCCAAAGGTTTTAGAGCTAGA | PE3 ngRNA (TG PAM) |
| | AATAGCAAGTTAAAATAAGGCTAGTCCGTTATCA | |
| | ACTTGAAAAAGTGGCACCGAGTCGGTGC (SEQ ID | |
| | NO: 323) | |
| 324 | GTGAAGACAGGTGTCTTGCTGTTTTAGAGCTAGA | PE3 ngRNA (GG PAM) |
| | AATAGCAAGTTAAAATAAGGCTAGTCCGTTATCA | |
| | ACTTGAAAAAGTGGCACCGAGTCGGTGC (SEQ ID | |
| | NO: 324) | |
| 325 | CGTGAAGACAGGTGTCTTGCGTTTTAGAGCTAGA | PE3 ngRNA (TG PAM) |
| | AATAGCAAGTTAAAATAAGGCTAGTCCGTTATCA | |
| | ACTTGAAAAAGTGGCACCGAGTCGGTGC (SEQ ID | |
| | NO: 325) | |
| 326 | GAACTGAGCCACGTGAAGACGTTTTAGAGCTAG | PE3 ngRNA (AG PAM) |
| | AAATAGCAAGTTAAAATAAGGCTAGTCCGTTATC | |
| | AACTTGAAAAAGTGGCACCGAGTCGGTGC (SEQ | |
| | ID NO: 326) | |
| 327 | ACATCTTCCTTAGGAACTCCGTTTTAGAGCTAGA | PE3 ngRNA (TG PAM) |
| | AATAGCAAGTTAAAATAAGGCTAGTCCGTTATCA | |
| | ACTTGAAAAAGTGGCACCGAGTCGGTGC (SEQ ID | |
| | NO: 327) | |
| 328 | AGGCTTCATACATCTTCCTTGTTTTAGAGCTAGA | PE3 ngRNA (AG PAM) |
| | AATAGCAAGTTAAAATAAGGCTAGTCCGTTATCA | |
| | ACTTGAAAAAGTGGCACCGAGTCGGTGC (SEQ ID | |
| | NO: 328) | |
| 329 | ACTACTTACCATCTCTTTCAGTTTTAGAGCTAGA | PE3 ngRNA (AG PAM) |
| | AATAGCAAGTTAAAATAAGGCTAGTCCGTTATCA | |
| | ACTTGAAAAAGTGGCACCGAGTCGGTGC (SEQ ID | |
| | NO: 329) | |
| 330 | GTCTTGCTGGGTTTCCAAAGGTTTTAGAGCTAGA | PE3 ngRNA (TG PAM), contains end |
| | AATAGCAAGTTAAAATAAGGCTAGTCCGTTATCA | adaptations |
| | ACTTGAAAAAGTGGCACCGAGTCGGTGCTTTT | |
| | (SEQ ID NO: 330) | |
| 331 | GTGAAGACAGGTGTCTTGCTGTTTTAGAGCTAGA | PE3 ngRNA (GG PAM), contains end |
| | AATAGCAAGTTAAAATAAGGCTAGTCCGTTATCA | adaptations |
| | ACTTGAAAAAGTGGCACCGAGTCGGTGCTTTT | |
| | (SEQ ID NO: 331) | |
| 332 | GAACTGAGCCACGTGAAGACGTTTTAGAGCTAG | PE3 ngRNA (AG PAM), contains end |
| | AAATAGCAAGTTAAAATAAGGCTAGTCCGTTATC | adaptations |
| | AACTTGAAAAAGTGGCACCGAGTCGGTGCTTTT | |
| | (SEQ ID NO: 332) | |
| 333 | GCGTGAAGACAGGTGTCTTGCGTTTTAGAGCTAG | PE3 ngRNA (TG PAM), contains end |
| | AAATAGCAAGTTAAAATAAGGCTAGTCCGTTATC | adaptations |
| | AACTTGAAAAAGTGGCACCGAGTCGGTGCTTTT | |
| | (SEQ ID NO: 333) | |
| 334 | GACATCTTCCTTAGGAACTCCGTTTTAGAGCTAG | PE3 ngRNA (TG PAM), contains end |
| | AAATAGCAAGTTAAAATAAGGCTAGTCCGTTATC | adaptations |
| | AACTTGAAAAAGTGGCACCGAGTCGGTGCTTTT | |
| | (SEQ ID NO: 334) | |
| 335 | GAGGCTTCATACATCTTCCTTGTTTTAGAGCTAG | PE3 ngRNA (AG PAM), contains end |
| | AAATAGCAAGTTAAAATAAGGCTAGTCCGTTATC | adaptations |
| | AACTTGAAAAAGTGGCACCGAGTCGGTGCTTTT | |
| | (SEQ ID NO: 335) | |
| 336 | GACTACTTACCATCTCTTTCAGTTTTAGAGCTAG | PE3 ngRNA (AG PAM), contains end |
| | AAATAGCAAGTTAAAATAAGGCTAGTCCGTTATC | adaptations |
| | AACTTGAAAAAGTGGCACCGAGTCGGTGCTTTT | |
| | (SEQ ID NO: 336) | |
| 337 | GTCTTGCTGGGTTTCCAAAGGTTTTAGAGCTAGA | PE3 ngRNA (TG PAM), contains linker |
| | AATAGCAAGTTAAAATAAGGCTAGTCCGTTATCA | sequence AACATTGA; hairpin SEQ ID |
| | ACTTGAAAAAGTGGCACCGAGTCGGTGCAACAT | NO: 3591; end adaptations |
| | TGACGCGTCTCTACGTGGGGGCGCGTTTT (SEQ | |
| | ID NO: 337) | |
| 338 | GTGAAGACAGGTGTCTTGCTGTTTTAGAGCTAGA | PE3 ngRNA (GG PAM), contains linker |
| | AATAGCAAGTTAAAATAAGGCTAGTCCGTTATCA | sequence AACATTGA; hairpin SEQ ID |
| | ACTTGAAAAAGTGGCACCGAGTCGGTGCAACAT | NO: 3591; end adaptations |
| | TGACGCGTCTCTACGTGGGGGCGCGTTTT (SEQ | |
| | ID NO: 338) | |
| 339 | GAACTGAGCCACGTGAAGACGTTTTAGAGCTAG | PE3 ngRNA (AG PAM), contains linker |
| | AAATAGCAAGTTAAAATAAGGCTAGTCCGTTATC | sequence AACATTGA; hairpin SEQ ID |
| | AACTTGAAAAAGTGGCACCGAGTCGGTGCAACA | NO: 3591; end adaptations |
| | TTGACGCGTCTCTACGTGGGGGCGCGTTTT (SEQ | |
| | ID NO: 339) | |
| 340 | GCGTGAAGACAGGTGTCTTGCGTTTTAGAGCTAG | PE3 ngRNA (TG PAM), contains linker |
| | AAATAGCAAGTTAAAATAAGGCTAGTCCGTTATC | sequence AACATTGA; hairpin SEQ ID |
| | AACTTGAAAAAGTGGCACCGAGTCGGTGCAACA | NO: 3591; end adaptations |
| | TTGACGCGTCTCTACGTGGGGGCGCGTTTT (SEQ | |
| | ID NO: 340) | |
| 341 | GACATCTTCCTTAGGAACTCCGTTTTAGAGCTAG | PE3 ngRNA (TG PAM), contains linker |
| | AAATAGCAAGTTAAAATAAGGCTAGTCCGTTATC | sequence AACATTGA; hairpin SEQ ID |
| | AACTTGAAAAAGTGGCACCGAGTCGGTGCAACA | NO: 3591; end adaptations |
| | TTGACGCGTCTCTACGTGGGGGCGCGTTTT (SEQ | |
| | ID NO: 341) | |
| 342 | GAGGCTTCATACATCTTCCTTGTTTTAGAGCTAG | PE3 ngRNA (AG PAM), contains linker |
| | AAATAGCAAGTTAAAATAAGGCTAGTCCGTTATC | sequence AACATTGA; hairpin SEQ ID |
| | AACTTGAAAAAGTGGCACCGAGTCGGTGCAACA | NO: 3591; end adaptations |
| | TTGACGCGTCTCTACGTGGGGGCGCGTTTT (SEQ | |
| | ID NO: 342) | |
| 343 | GACTACTTACCATCTCTTTCAGTTTTAGAGCTAG | PE3 ngRNA (AG PAM), contains linker |
| | AAATAGCAAGTTAAAATAAGGCTAGTCCGTTATC | sequence AACATTGA; hairpin SEQ ID |
| | AACTTGAAAAAGTGGCACCGAGTCGGTGCAACA | NO: 3591; end adaptations |
| | TTGACGCGTCTCTACGTGGGGGCGCGTTTT (SEQ | |
| | ID NO: 343) | |

TABLE 31

| Sequence | | |
|---|---|---|
| Number | Sequence | Description |
| 2279 | CTGGGTTTCCAAAGTGG (SEQ ID NO: 2279) | PEgRNA spacer (AAG PAM) |
| 2280 | GCTGGGTTTCCAAAGTGG (SEQ ID NO: 2280) | PEgRNA spacer (AAG PAM) |
| 2281 | TGCTGGGTTTCCAAAGTGG (SEQ ID NO: 2281) | PEgRNA spacer (AAG PAM) |
| 488 | TTGCTGGGTTTCCAAAGTGG (SEQ ID NO: 488) | PEgRNA spacer (AAG PAM) |
| 2282 | CTTGCTGGGTTTCCAAAGTGG (SEQ ID NO: 2282) | PEgRNA spacer (AAG PAM) |
| 2283 | TCTTGCTGGGTTTCCAAAGTGG (SEQ ID NO: 2283) | PEgRNA spacer (AAG PAM) |
| 2284 | CTTTG | PBS |
| 2285 | CTTTGG | PBS |
| 2286 | CTTTGGA | PBS |
| 2287 | CTTTGGAA | PBS |
| 2288 | CTTTGGAAA | PBS |
| 2289 | CTTTGGAAAC (SEQ ID NO: 2289) | PBS |
| 2290 | CTTTGGAAACC (SEQ ID NO: 2290) | PBS |
| 2291 | CTTTGGAAACCC (SEQ ID NO: 2291) | PBS |
| 2292 | CTTTGGAAACCCA (SEQ ID NO: 2292) | PBS |
| 2293 | CTTTGGAAACCCAG (SEQ ID NO: 2293) | PBS |
| 2294 | CTTTGGAAACCCAGC (SEQ ID NO: 2294) | PBS |
| 2295 | CTTTGGAAACCCAGCA (SEQ ID NO: 2295) | PBS |
| 2296 | CTTTGGAAACCCAGCAA (SEQ ID NO: 2296) | PBS |
| 2297 | CTTTGGAAACCCAGCAAG (SEQ ID NO: 2297) | PBS |
| 2298 | CTTTGGAAACCCAGCAAGA (SEQ ID NO: 2298) | PBS |
| 2299 | GATCAGGCATCCA (SEQ ID NO: 2299) | RTT (AAG-to-ATG PAM silencing edit) |
| 2300 | GATCAGGCCTCCA (SEQ ID NO: 2300) | RTT (AAG-to-AGG PAM silencing edit) |
| 2301 | GATCAGGCGTCCA (SEQ ID NO: 2301) | RTT (AAG-to-ACG PAM silencing edit) |
| 2302 | GATCAGGCTTCCA (SEQ ID NO: 2302) | RTT |
| 2303 | GGATCAGGCATCCA (SEQ ID NO: 2303) | RTT (AAG-to-ATG PAM silencing edit) |
| 2304 | GGATCAGGCCTCCA (SEQ ID NO: 2304) | RTT (AAG-to-AGG PAM silencing edit) |
| 2305 | GGATCAGGCGTCCA (SEQ ID NO: 2305) | RTT (AAG-to-ACG PAM silencing edit) |
| 2306 | GGATCAGGCTTCCA (SEQ ID NO: 2306) | RTT |
| 2307 | GGGATCAGGCATCCA (SEQ ID NO: 2307) | RTT (AAG-to-ATG PAM silencing edit) |
| 2308 | GGGATCAGGCCTCCA (SEQ ID NO: 2308) | RTT (AAG-to-AGG PAM silencing edit) |
| 2309 | GGGATCAGGCGTCCA (SEQ ID NO: 2309) | RTT (AAG-to-ACG PAM silencing edit) |
| 2310 | GGGATCAGGCTTCCA (SEQ ID NO: 2310) | RTT |
| 2311 | TGGGATCAGGCATCCA (SEQ ID NO: 2311) | RTT (AAG-to-ATG PAM silencing edit) |
| 2312 | TGGGATCAGGCCTCCA (SEQ ID NO: 2312) | RTT (AAG-to-AGG PAM silencing edit) |
| 2313 | TGGGATCAGGCGTCCA (SEQ ID NO: 2313) | RTT (AAG-to-ACG PAM silencing edit) |
| 2314 | TGGGATCAGGCTTCCA (SEQ ID NO: 2314) | RTT |
| 2315 | ATGGGATCAGGCATCCA (SEQ ID NO: 2315) | RTT (AAG-to-ATG PAM silencing edit) |
| 2316 | ATGGGATCAGGCCTCCA (SEQ ID NO: 2316) | RTT (AAG-to-AGG PAM silencing edit) |
| 2317 | ATGGGATCAGGCGTCCA (SEQ ID NO: 2317) | RTT (AAG-to-ACG PAM silencing edit) |
| 2318 | ATGGGATCAGGCTTCCA (SEQ ID NO: 2318) | RTT |
| 2319 | TATGGGATCAGGCATCCA (SEQ ID NO: 2319) | RTT (AAG-to-ATG PAM silencing edit) |
| 2320 | TATGGGATCAGGCCTCCA (SEQ ID NO: 2320) | RTT (AAG-to-AGG PAM silencing edit) |
| 2321 | TATGGGATCAGGCGTCCA (SEQ ID NO: 2321) | RTT (AAG-to-ACG PAM silencing edit) |
| 2322 | TATGGGATCAGGCTTCCA (SEQ ID NO: 2322) | RTT |
| 2323 | GTATGGGATCAGGCATCCA (SEQ ID NO: 2323) | RTT (AAG-to-ATG PAM silencing edit) |
| 2324 | GTATGGGATCAGGCCTCCA (SEQ ID NO: 2324) | RTT (AAG-to-AGG PAM silencing edit) |
| 2325 | GTATGGGATCAGGCGTCCA (SEQ ID NO: 2325) | RTT (AAG-to-ACG PAM silencing edit) |
| 2326 | GTATGGGATCAGGCTTCCA (SEQ ID NO: 2326) | RTT |
| 2327 | TGTATGGGATCAGGCATCCA (SEQ ID NO: 2327) | RTT (AAG-to-ATG PAM silencing edit) |
| 2328 | TGTATGGGATCAGGCCTCCA (SEQ ID NO: 2328) | RTT (AAG-to-AGG PAM silencing edit) |
| 2329 | TGTATGGGATCAGGCGTCCA (SEQ ID NO: 2329) | RTT (AAG-to-ACG PAM silencing edit) |
| 2330 | TGTATGGGATCAGGCTTCCA (SEQ ID NO: 2330) | RTT |
| 2331 | CTGTATGGGATCAGGCATCCA (SEQ ID NO: 2331) | RTT (AAG-to-ATG PAM silencing edit) |
| 2332 | CTGTATGGGATCAGGCCTCCA (SEQ ID NO: 2332) | RTT (AAG-to-AGG PAM silencing edit) |
| 2333 | CTGTATGGGATCAGGCGTCCA (SEQ ID NO: 2333) | RTT (AAG-to-ACG PAM silencing edit) |
| 2334 | CTGTATGGGATCAGGCTTCCA (SEQ ID NO: 2334) | RTT |
| 2335 | TCTGTATGGGATCAGGCATCCA (SEQ ID NO: 2335) | RTT (AAG-to-ATG PAM silencing edit) |
| 2336 | TCTGTATGGGATCAGGCCTCCA (SEQ ID NO: 2336) | RTT (AAG-to-AGG PAM silencing edit) |
| 2337 | TCTGTATGGGATCAGGCGTCCA (SEQ ID NO: 2337) | RTT (AAG-to-ACG PAM silencing edit) |
| 2338 | TCTGTATGGGATCAGGCTTCCA (SEQ ID NO: 2338) | RTT |
| 2339 | TTCTGTATGGGATCAGGCATCCA (SEQ ID NO: | RTT (AAG-to-ATG PAM silencing edit) |
| | 2339) | |
| 2340 | TTCTGTATGGGATCAGGCCTCCA (SEQ ID NO: | RTT (AAG-to-AGG PAM silencing edit) |
| | 2340) | |
| 2341 | TTCTGTATGGGATCAGGCGTCCA (SEQ ID NO: | RTT (AAG-to-ACG PAM silencing edit) |
| | 2341) | |
| 2342 | TTCTGTATGGGATCAGGCTTCCA (SEQ ID NO: | RTT |
| | 2342) | |
| 2343 | TTTCTGTATGGGATCAGGCATCCA (SEQ ID NO: | RTT (AAG-to-ATG PAM silencing edit) |
| | 2343) | |
| 2344 | TTTCTGTATGGGATCAGGCCTCCA (SEQ ID NO: | RTT (AAG-to-AGG PAM silencing edit) |
| | 2344) | |
| 2345 | TTTCTGTATGGGATCAGGCGTCCA (SEQ ID NO: | RTT (AAG-to-ACG PAM silencing edit) |
| | 2345) | |
| 2346 | TTTCTGTATGGGATCAGGCTTCCA (SEQ ID NO: | RTT |
| | 2346) | |
| 2347 | CTTTCTGTATGGGATCAGGCATCCA (SEQ ID NO: | RTT (AAG-to-ATG PAM silencing edit) |
| | 2347) | |
| 2348 | CTTTCTGTATGGGATCAGGCCTCCA (SEQ ID NO: | RTT (AAG-to-AGG PAM silencing edit) |
| | 2348) | |
| 2349 | CTTTCTGTATGGGATCAGGCGTCCA (SEQ ID NO: | RTT (AAG-to-ACG PAM silencing edit) |
| | 2349) | |
| 2350 | CTTTCTGTATGGGATCAGGCTTCCA (SEQ ID NO: | RTT |
| | 2350) | |
| 2351 | GCTTTCTGTATGGGATCAGGCATCCA (SEQ ID | RTT (AAG-to-ATG PAM silencing edit) |
| | NO: 2351) | |
| 2352 | GCTTTCTGTATGGGATCAGGCCTCCA (SEQ ID NO: | RTT (AAG-to-AGG PAM silencing edit) |
| | 2352) | |
| 2353 | GCTTTCTGTATGGGATCAGGCGTCCA (SEQ ID | RTT (AAG-to-ACG PAM silencing edit) |
| | NO: 2353) | |
| 2354 | GCTTTCTGTATGGGATCAGGCTTCCA (SEQ ID NO: | RTT |
| | 2354) | |
| 2355 | AGCTTTCTGTATGGGATCAGGCATCCA (SEQ ID | RTT (AAG-to-ATG PAM silencing edit) |
| | NO: 2355) | |
| 2356 | AGCTTTCTGTATGGGATCAGGCCTCCA (SEQ ID | RTT (AAG-to-AGG PAM silencing edit) |
| | NO: 2356) | |
| 2357 | AGCTTTCTGTATGGGATCAGGCGTCCA (SEQ ID | RTT (AAG-to-ACG PAM silencing edit) |
| | NO: 2357) | |
| 2358 | AGCTTTCTGTATGGGATCAGGCTTCCA (SEQ ID | RTT |
| | NO: 2358) | |
| 2359 | AAGCTTTCTGTATGGGATCAGGCATCCA (SEQ ID | RTT (AAG-to-ATG PAM silencing edit) |
| | NO: 2359) | |
| 2360 | AAGCTTTCTGTATGGGATCAGGCCTCCA (SEQ ID | RTT (AAG-to-AGG PAM silencing edit) |
| | NO: 2360) | |
| 2361 | AAGCTTTCTGTATGGGATCAGGCGTCCA (SEQ ID | RTT (AAG-to-ACG PAM silencing edit) |
| | NO: 2361) | |
| 2362 | AAGCTTTCTGTATGGGATCAGGCTTCCA (SEQ ID | RTT |
| | NO: 2362) | |
| 2363 | GAAGCTTTCTGTATGGGATCAGGCATCCA (SEQ | RTT (AAG-to-ATG PAM silencing edit) |
| | ID NO: 2363) | |
| 2364 | GAAGCTTTCTGTATGGGATCAGGCCTCCA (SEQ | RTT (AAG-to-AGG PAM silencing edit) |
| | ID NO: 2364) | |
| 2365 | GAAGCTTTCTGTATGGGATCAGGCGTCCA (SEQ | RTT (AAG-to-ACG PAM silencing edit) |
| | ID NO: 2365) | |
| 2366 | GAAGCTTTCTGTATGGGATCAGGCTTCCA (SEQ | RTT |
| | ID NO: 2366) | |
| 2367 | AGAAGCTTTCTGTATGGGATCAGGCATCCA (SEQ | RTT (AAG-to-ATG PAM silencing edit) |
| | ID NO: 2367) | |
| 2368 | AGAAGCTTTCTGTATGGGATCAGGCCTCCA (SEQ | RTT (AAG-to-AGG PAM silencing edit) |
| | ID NO: 2368) | |
| 2369 | AGAAGCTTTCTGTATGGGATCAGGCGTCCA (SEQ | RTT (AAG-to-ACG PAM silencing edit) |
| | ID NO: 2369) | |
| 2370 | AGAAGCTTTCTGTATGGGATCAGGCTTCCA (SEQ | RTT |
| | ID NO: 2370) | |
| 2371 | CAGAAGCTTTCTGTATGGGATCAGGCATCCA | RTT (AAG-to-ATG PAM silencing edit) |
| | (SEQ ID NO: 2371) | |
| 2372 | CAGAAGCTTTCTGTATGGGATCAGGCCTCCA | RTT (AAG-to-AGG PAM silencing edit) |
| | (SEQ ID NO: 2372) | |
| 2373 | CAGAAGCTTTCTGTATGGGATCAGGCGTCCA | RTT (AAG-to-ACG PAM silencing edit) |
| | (SEQ ID NO: 2373) | |
| 2374 | CAGAAGCTTTCTGTATGGGATCAGGCTTCCA | RTT |
| | (SEQ ID NO: 2374) | |
| 2375 | GCAGAAGCTTTCTGTATGGGATCAGGCATCCA | RTT (AAG-to-ATG PAM silencing edit) |
| | (SEQ ID NO: 2375) | |
| 2376 | GCAGAAGCTTTCTGTATGGGATCAGGCCTCCA | RTT (AAG-to-AGG PAM silencing edit) |
| | (SEQ ID NO: 2376) | |
| 2377 | GCAGAAGCTTTCTGTATGGGATCAGGCGTCCA | RTT (AAG-to-ACG PAM silencing edit) |
| | (SEQ ID NO: 2377) | |
| 2378 | GCAGAAGCTTTCTGTATGGGATCAGGCTTCCA | RTT |
| | (SEQ ID NO: 2378) | |
| 2379 | TGCAGAAGCTTTCTGTATGGGATCAGGCATCCA | RTT (AAG-to-ATG PAM silencing edit) |
| | (SEQ ID NO: 2379) | |
| 2380 | TGCAGAAGCTTTCTGTATGGGATCAGGCCTCCA | RTT (AAG-to-AGG PAM silencing edit) |
| | (SEQ ID NO: 2380) | |
| 2381 | TGCAGAAGCTTTCTGTATGGGATCAGGCGTCCA | RTT (AAG-to-ACG PAM silencing edit) |
| | (SEQ ID NO: 2381) | |
| 2382 | TGCAGAAGCTTTCTGTATGGGATCAGGCTTCCA | RTT |
| | (SEQ ID NO: 2382) | |
| 2383 | ATGCAGAAGCTTTCTGTATGGGATCAGGCATCCA | RTT (AAG-to-ATG PAM silencing edit) |
| | (SEQ ID NO: 2383) | |
| 2384 | ATGCAGAAGCTTTCTGTATGGGATCAGGCCTCCA | RTT (AAG-to-AGG PAM silencing edit) |
| | (SEQ ID NO: 2384) | |
| 2385 | ATGCAGAAGCTTTCTGTATGGGATCAGGCGTCCA | RTT (AAG-to-ACG PAM silencing edit) |
| | (SEQ ID NO: 2385) | |
| 2386 | ATGCAGAAGCTTTCTGTATGGGATCAGGCTTCCA | RTT |
| | (SEQ ID NO: 2386) | |
| 2387 | GATGCAGAAGCTTTCTGTATGGGATCAGGCATCC | RTT (AAG-to-ATG PAM silencing edit) |
| | A (SEQ ID NO: 2387) | |
| 2388 | GATGCAGAAGCTTTCTGTATGGGATCAGGCCTCC | RTT (AAG-to-AGG PAM silencing edit) |
| | A (SEQ ID NO: 2388) | |
| 2389 | GATGCAGAAGCTTTCTGTATGGGATCAGGCGTCC | RTT (AAG-to-ACG PAM silencing edit) |
| | A (SEQ ID NO: 2389) | |
| 2390 | GATGCAGAAGCTTTCTGTATGGGATCAGGCTTCC | RTT |
| | A (SEQ ID NO: 2390) | |
| 2391 | GGATGCAGAAGCTTTCTGTATGGGATCAGGCATC | RTT (AAG-to-ATG PAM silencing edit) |
| | CA (SEQ ID NO: 2391) | |
| 2392 | GGATGCAGAAGCTTTCTGTATGGGATCAGGCCTC | RTT (AAG-to-AGG PAM silencing edit) |
| | CA (SEQ ID NO: 2392) | |
| 2393 | GGATGCAGAAGCTTTCTGTATGGGATCAGGCGTC | RTT (AAG-to-ACG PAM silencing edit) |
| | CA (SEQ ID NO: 2393) | |
| 2394 | GGATGCAGAAGCTTTCTGTATGGGATCAGGCTTC | RTT |
| | CA (SEQ ID NO: 2394) | |
| 2395 | TGGATGCAGAAGCTTTCTGTATGGGATCAGGCAT | RTT (AAG-to-ATG PAM silencing edit) |
| | CCA (SEQ ID NO: 2395) | |
| 2396 | TGGATGCAGAAGCTTTCTGTATGGGATCAGGCCT | RTT (AAG-to-AGG PAM silencing edit) |
| | CCA (SEQ ID NO: 2396) | |
| 2397 | TGGATGCAGAAGCTTTCTGTATGGGATCAGGCGT | RTT (AAG-to-ACG PAM silencing edit) |
| | CCA (SEQ ID NO: 2397) | |
| 2398 | TGGATGCAGAAGCTTTCTGTATGGGATCAGGCTT | RTT |
| | CCA (SEQ ID NO: 2398) | |
| 2399 | TTGGATGCAGAAGCTTTCTGTATGGGATCAGGCA | RTT (AAG-to-ATG PAM silencing edit) |
| | TCCA (SEQ ID NO: 2399) | |
| 2400 | TTGGATGCAGAAGCTTTCTGTATGGGATCAGGCC | RTT (AAG-to-AGG PAM silencing edit) |
| | TCCA (SEQ ID NO: 2400) | |
| 2401 | TTGGATGCAGAAGCTTTCTGTATGGGATCAGGCG | RTT (AAG-to-ACG PAM silencing edit) |
| | TCCA (SEQ ID NO: 2401) | |
| 2402 | TTGGATGCAGAAGCTTTCTGTATGGGATCAGGCT | RTT |
| | TCCA (SEQ ID NO: 2402) | |
| 2403 | TTTGGATGCAGAAGCTTTCTGTATGGGATCAGGC | RTT (AAG-to-ATG PAM silencing edit) |
| | ATCCA (SEQ ID NO: 2403) | |
| 2404 | TTTGGATGCAGAAGCTTTCTGTATGGGATCAGGC | RTT (AAG-to-AGG PAM silencing edit) |
| | CTCCA (SEQ ID NO: 2404) | |
| 2405 | TTTGGATGCAGAAGCTTTCTGTATGGGATCAGGC | RTT (AAG-to-ACG PAM silencing edit) |
| | GTCCA (SEQ ID NO: 2405) | |
| 2406 | TTTGGATGCAGAAGCTTTCTGTATGGGATCAGGC | RTT |
| | TTCCA (SEQ ID NO: 2406) | |
| 2407 | TTTTGGATGCAGAAGCTTTCTGTATGGGATCAGG | RTT (AAG-to-ATG PAM silencing edit) |
| | CATCCA (SEQ ID NO: 2407) | |
| 2408 | TTTTGGATGCAGAAGCTTTCTGTATGGGATCAGG | RTT (AAG-to-AGG PAM silencing edit) |
| | CCTCCA (SEQ ID NO: 2408) | |
| 2409 | TTTTGGATGCAGAAGCTTTCTGTATGGGATCAGG | RTT (AAG-to-ACG PAM silencing edit) |
| | CGTCCA (SEQ ID NO: 2409) | |
| 2410 | TTTTGGATGCAGAAGCTTTCTGTATGGGATCAGG | RTT |
| | CTTCCA (SEQ ID NO: 2410) | |
| 127 | AGAAGCTTTCTGTATGGGAT (SEQ ID NO: 127) | PE3b ngRNA spacer (CAG PAM) |
| 1223 | ATCACCTTTTCGCTTTTTCC (SEQ ID NO: 1223) | PE3 ngRNA spacer (AAG PAM) |
| 418 | ATTATCAGTTTTGGATGCAG (SEQ ID NO: 418) | PE3 ngRNA spacer (AAG PAM) |
| 1224 | CAAGATGGCTCAAGATTCAG (SEQ ID NO: 1224) | PE3 ngRNA spacer (TAG PAM) |
| 1225 | CGCTTTTTCCAAGATGGCTC (SEQ ID NO: 1225) | PE3 ngRNA spacer (AAG PAM) |
| 1226 | GTGATTATCAGTTTTGGATG (SEQ ID NO: 1226) | PE3 ngRNA spacer (CAG PAM) |
| 1227 | GTGCTGGACAGGCTGCTGTG (SEQ ID NO: 1227) | PE3 ngRNA spacer (AAG PAM) |
| 1228 | TAGATCTTTCTTGTGATTAT (SEQ ID NO: 1228) | PE3 ngRNA spacer (CAG PAM) |
| 1229 | TTCCAAGATGGCTCAAGATT (SEQ ID NO: 1229) | PE3 ngRNA spacer (CAG PAM) |

TABLE 32

| Sequence | | |
|---|---|---|
| Number | Sequence | Description |
| 2411 | TGATTATCAGTTTTGGA (SEQ ID NO: 2411) | PEgRNA spacer (TG PAM) |
| 2412 | GTGATTATCAGTTTTGGA (SEQ ID NO: 2412) | PEgRNA spacer (TG PAM) |
| 2413 | TGTGATTATCAGTTTTGGA (SEQ ID NO: 2413) | PEgRNA spacer (TG PAM) |
| 46 | TTGTGATTATCAGTTTTGGA (SEQ ID NO: 46) | PEgRNA spacer (TG PAM) |
| 2414 | CTTGTGATTATCAGTTTTGGA (SEQ ID NO: 2414) | PEgRNA spacer (TG PAM) |
| 2415 | TCTTGTGATTATCAGTTTTGGA (SEQ ID NO: 2415) | PEgRNA spacer (TG PAM) |
| 2416 | AAAAC | PBS |
| 2417 | AAAACT | PBS |
| 2418 | AAAACTG | PBS |
| 2419 | AAAACTGA | PBS |
| 2420 | AAAACTGAT | PBS |
| 2421 | AAAACTGATA (SEQ ID NO: 2421) | PBS |
| 2422 | AAAACTGATAA (SEQ ID NO: 2422) | PBS |
| 2423 | AAAACTGATAAT (SEQ ID NO: 2423) | PBS |
| 2424 | AAAACTGATAATC (SEQ ID NO: 2424) | PBS |
| 2425 | AAAACTGATAATCA (SEQ ID NO: 2425) | PBS |
| 2426 | AAAACTGATAATCAC (SEQ ID NO: 2426) | PBS |
| 2427 | AAAACTGATAATCACA (SEQ ID NO: 2427) | PBS |
| 2428 | AAAACTGATAATCACAA (SEQ ID NO: 2428) | PBS |
| 2429 | AAAACTGATAATCACAAG (SEQ ID NO: 2429) | PBS |
| 2430 | AAAACTGATAATCACAAGA (SEQ ID NO: 2430) | PBS |
| 2431 | CCCATACAGAAAGCTTCTGCATCC (SEQ ID NO: | RTT |
| | 2431) | |
| 2432 | TCCCATACAGAAAGCTTCTGCATCC (SEQ ID NO: | RTT |
| | 2432) | |
| 2433 | ATCCCATACAGAAAGCTTCTGCATCC (SEQ ID | RTT |
| | NO: 2433) | |
| 2434 | GATCCCATACAGAAAGCTTCTGCATCC (SEQ ID | RTT |
| | NO: 2434) | |
| 2435 | TGATCCCATACAGAAAGCTTCTGCATCC (SEQ ID | RTT |
| | NO: 2435) | |
| 2436 | CTGATCCCATACAGAAAGCTTCTGCATCC (SEQ | RTT |
| | ID NO: 2436) | |
| 2437 | CCTGATCCCATACAGAAAGCTTCTGCATCC (SEQ | RTT |
| | ID NO: 2437) | |
| 2438 | GCCTGATCCCATACAGAAAGCTTCTGCATCC | RTT |
| | (SEQ ID NO: 2438) | |
| 2439 | AGCCTGATCCCATACAGAAAGCTTCTGCATCC | RTT |
| | (SEQ ID NO: 2439) | |
| 2440 | AAGCCTGATCCCATACAGAAAGCTTCTGCATCC | RTT |
| | (SEQ ID NO: 2440) | |
| 2441 | GAAGCCTGATCCCATACAGAAAGCTTCTGCATCC | RTT |
| | (SEQ ID NO: 2441) | |
| 2442 | GGAAGCCTGATCCCATACAGAAAGCTTCTGCATC | RTT |
| | C (SEQ ID NO: 2442) | |
| 2443 | TGGAAGCCTGATCCCATACAGAAAGCTTCTGCAT | RTT |
| | CC (SEQ ID NO: 2443) | |
| 2444 | GTGGAAGCCTGATCCCATACAGAAAGCTTCTGC | RTT |
| | ATCC (SEQ ID NO: 2444) | |
| 2445 | AGTGGAAGCCTGATCCCATACAGAAAGCTTCTG | RTT |
| | CATCC (SEQ ID NO: 2445) | |
| 2446 | AAGTGGAAGCCTGATCCCATACAGAAAGCTTCT | RTT |
| | GCATCC (SEQ ID NO: 2446) | |
| 2447 | AAAGTGGAAGCCTGATCCCATACAGAAAGCTTC | RTT |
| | TGCATCC (SEQ ID NO: 2447) | |
| 4 | AACTGAGCCACGTGAAGACA (SEQ ID NO: 4) | PE3 ngRNA spacer (GG PAM) |
| 382 | AAGCCTGATCCCATACAGAA (SEQ ID NO: 382) | PE3b ngRNA spacer (AG PAM) |
| 195 | ACATCTTCCTTAGGAACTCC (SEQ ID NO: 195) | PE3 ngRNA spacer (TG PAM) |
| 196 | ACTACTTACCATCTCTTTCA (SEQ ID NO: 196) | PE3 ngRNA spacer (AG PAM) |
| 197 | ACTCCTGGAACTGAGCCACG (SEQ ID NO: 197) | PE3 ngRNA spacer (TG PAM) |
| 199 | AGGCTTCATACATCTTCCTT (SEQ ID NO: 199) | PE3 ngRNA spacer (AG PAM) |
| 200 | CATCTTCCTTAGGAACTCCT (SEQ ID NO: 200) | PE3 ngRNA spacer (GG PAM) |
| 201 | CCACGTGAAGACAGGTGTCT (SEQ ID NO: 201) | PE3 ngRNA spacer (TG PAM) |
| 202 | CCTGGAACTGAGCCACGTGA (SEQ ID NO: 202) | PE3 ngRNA spacer (AG PAM) |
| 203 | CGTGAAGACAGGTGTCTTGC (SEQ ID NO: 203) | PE3 ngRNA spacer (TG PAM) |
| 204 | CTACTTACCATCTCTTTCAA (SEQ ID NO: 204) | PE3 ngRNA spacer (GG PAM) |
| 205 | CTGAGCCACGTGAAGACAGG (SEQ ID NO: 205) | PE3 ngRNA spacer (TG PAM) |
| 206 | CTTAGGAACTCCTGGAACTG (SEQ ID NO: 206) | PE3 ngRNA spacer (AG PAM) |
| 208 | GAACTCCTGGAACTGAGCCA (SEQ ID NO: 208) | PE3 ngRNA spacer (CG PAM) |
| 209 | GAACTGAGCCACGTGAAGAC (SEQ ID NO: 209) | PE3 ngRNA spacer (AG PAM) |
| 383 | GATCCCATACAGAAAGCTTC (SEQ ID NO: 383) | PE3b ngRNA spacer (TG PAM) |
| 210 | GGCTTCATACATCTTCCTTA (SEQ ID NO: 210) | PE3 ngRNA spacer (GG PAM) |
| 211 | GGGTTTCCAAAGTGGAAGCC (SEQ ID NO: 211) | PE3 ngRNA spacer (TG PAM) |
| 212 | GTCTTGCTGGGTTTCCAAAG (SEQ ID NO: 212) | PE3 ngRNA spacer (TG PAM) |
| 213 | GTGAAGACAGGTGTCTTGCT (SEQ ID NO: 213) | PE3 ngRNA spacer (GG PAM) |
| 384 | GTGGAAGCCTGATCCCATAC (SEQ ID NO: 384) | PE3b ngRNA spacer (AG PAM) |
| 214 | GTGTCTTGCTGGGTTTCCAA (SEQ ID NO: 214) | PE3 ngRNA spacer (AG PAM) |
| 215 | TCCTTAGGAACTCCTGGAAC (SEQ ID NO: 215) | PE3 ngRNA spacer (TG PAM) |
| 216 | TCTTGCTGGGTTTCCAAAGT (SEQ ID NO: 216) | PE3 ngRNA spacer (GG PAM) |
| 217 | TGAAGACAGGTGTCTTGCTG (SEQ ID NO: 217) | PE3 ngRNA spacer (GG PAM) |
| 218 | TGCTGGGTTTCCAAAGTGGA (SEQ ID NO: 218) | PE3 ngRNA spacer (AG PAM) |
| 323 | GTCTTGCTGGGTTTCCAAAGGTTTTAGAGCTAGA | PE3 ngRNA (TG PAM) |
| | AATAGCAAGTTAAAATAAGGCTAGTCCGTTATCA | |
| | ACTTGAAAAAGTGGCACCGAGTCGGTGC (SEQ ID | |
| | NO: 323) | |
| 324 | GTGAAGACAGGTGTCTTGCTGTTTTAGAGCTAGA | PE3 ngRNA (GG PAM) |
| | AATAGCAAGTTAAAATAAGGCTAGTCCGTTATCA | |
| | ACTTGAAAAAGTGGCACCGAGTCGGTGC (SEQ ID | |
| | NO: 324) | |
| 325 | CGTGAAGACAGGTGTCTTGCGTTTTAGAGCTAGA | PE3 ngRNA (TG PAM) |
| | AATAGCAAGTTAAAATAAGGCTAGTCCGTTATCA | |
| | ACTTGAAAAAGTGGCACCGAGTCGGTGC (SEQ ID | |
| | NO: 325) | |
| 326 | GAACTGAGCCACGTGAAGACGTTTTAGAGCTAG | PE3 ngRNA (AG PAM) |
| | AAATAGCAAGTTAAAATAAGGCTAGTCCGTTATC | |
| | AACTTGAAAAAGTGGCACCGAGTCGGTGC (SEQ | |
| | ID NO: 326) | |
| 327 | ACATCTTCCTTAGGAACTCCGTTTTAGAGCTAGA | PE3 ngRNA (TG PAM) |
| | AATAGCAAGTTAAAATAAGGCTAGTCCGTTATCA | |
| | ACTTGAAAAAGTGGCACCGAGTCGGTGC (SEQ ID | |
| | NO: 327) | |
| 328 | AGGCTTCATACATCTTCCTTGTTTTAGAGCTAGA | PE3 ngRNA (AG PAM) |
| | AATAGCAAGTTAAAATAAGGCTAGTCCGTTATCA | |
| | ACTTGAAAAAGTGGCACCGAGTCGGTGC (SEQ ID | |
| | NO: 328) | |
| 329 | ACTACTTACCATCTCTTTCAGTTTTAGAGCTAGA | PE3 ngRNA (AG PAM) |
| | AATAGCAAGTTAAAATAAGGCTAGTCCGTTATCA | |
| | ACTTGAAAAAGTGGCACCGAGTCGGTGC (SEQ ID | |
| | NO: 329) | |
| 330 | GTCTTGCTGGGTTTCCAAAGGTTTTAGAGCTAGA | PE3 ngRNA (TG PAM), contains end |
| | AATAGCAAGTTAAAATAAGGCTAGTCCGTTATCA | adaptations |
| | ACTTGAAAAAGTGGCACCGAGTCGGTGCTTTT | |
| | (SEQ ID NO: 330) | |
| 331 | GTGAAGACAGGTGTCTTGCTGTTTTAGAGCTAGA | PE3 ngRNA (GG PAM), contains end |
| | AATAGCAAGTTAAAATAAGGCTAGTCCGTTATCA | adaptations |
| | ACTTGAAAAAGTGGCACCGAGTCGGTGCTTTT | |
| | (SEQ ID NO: 331) | |
| 332 | GAACTGAGCCACGTGAAGACGTTTTAGAGCTAG | PE3 ngRNA (AG PAM), contains end |
| | AAATAGCAAGTTAAAATAAGGCTAGTCCGTTATC | adaptations |
| | AACTTGAAAAAGTGGCACCGAGTCGGTGCTTTT | |
| | (SEQ ID NO: 332) | |
| 333 | GCGTGAAGACAGGTGTCTTGCGTTTTAGAGCTAG | PE3 ngRNA (TG PAM), contains end |
| | AAATAGCAAGTTAAAATAAGGCTAGTCCGTTATC | adaptations |
| | AACTTGAAAAAGTGGCACCGAGTCGGTGCTTTT | |
| | (SEQ ID NO: 333) | |
| 334 | GACATCTTCCTTAGGAACTCCGTTTTAGAGCTAG | PE3 ngRNA (TG PAM), contains end |
| | AAATAGCAAGTTAAAATAAGGCTAGTCCGTTATC | adaptations |
| | AACTTGAAAAAGTGGCACCGAGTCGGTGCTTTT | |
| | (SEQ ID NO: 334) | |
| 335 | GAGGCTTCATACATCTTCCTTGTTTTAGAGCTAG | PE3 ngRNA (AG PAM), contains end |
| | AAATAGCAAGTTAAAATAAGGCTAGTCCGTTATC | adaptations |
| | AACTTGAAAAAGTGGCACCGAGTCGGTGCTTTT | |
| | (SEQ ID NO: 335) | |
| 336 | GACTACTTACCATCTCTTTCAGTTTTAGAGCTAG | PE3 ngRNA (AG PAM), contains end |
| | AAATAGCAAGTTAAAATAAGGCTAGTCCGTTATC | adaptations |
| | AACTTGAAAAAGTGGCACCGAGTCGGTGCTTTT | |
| | (SEQ ID NO: 336) | |
| 337 | GTCTTGCTGGGTTTCCAAAGGTTTTAGAGCTAGA | PE3 ngRNA (TG PAM), contains linker |
| | AATAGCAAGTTAAAATAAGGCTAGTCCGTTATCA | sequence AACATTGA; hairpin SEQ ID |
| | ACTTGAAAAAGTGGCACCGAGTCGGTGCAACAT | NO: 3591; end adaptations |
| | TGACGCGTCTCTACGTGGGGGCGCGTTTT (SEQ | |
| | ID NO: 337) | |
| 338 | GTGAAGACAGGTGTCTTGCTGTTTTAGAGCTAGA | PE3 ngRNA (GG PAM), contains linker |
| | AATAGCAAGTTAAAATAAGGCTAGTCCGTTATCA | sequence AACATTGA; hairpin SEQ ID |
| | ACTTGAAAAAGTGGCACCGAGTCGGTGCAACAT | NO: 3591; end adaptations |
| | TGACGCGTCTCTACGTGGGGGCGCGTTTT (SEQ | |
| | ID NO: 338) | |
| 339 | GAACTGAGCCACGTGAAGACGTTTTAGAGCTAG | PE3 ngRNA (AG PAM), contains linker |
| | AAATAGCAAGTTAAAATAAGGCTAGTCCGTTATC | sequence AACATTGA; hairpin SEQ ID |
| | AACTTGAAAAAGTGGCACCGAGTCGGTGCAACA | NO: 3591; end adaptations |
| | TTGACGCGTCTCTACGTGGGGGCGCGTTTT (SEQ | |
| | ID NO: 339) | |
| 340 | GCGTGAAGACAGGTGTCTTGCGTTTTAGAGCTAG | PE3 ngRNA (TG PAM), contains linker |
| | AAATAGCAAGTTAAAATAAGGCTAGTCCGTTATC | sequence AACATTGA; hairpin SEQ ID |
| | AACTTGAAAAAGTGGCACCGAGTCGGTGCAACA | NO: 3591; end adaptations |
| | TTGACGCGTCTCTACGTGGGGGCGCGTTTT (SEQ | |
| | ID NO: 340) | |
| 341 | GACATCTTCCTTAGGAACTCCGTTTTAGAGCTAG | PE3 ngRNA (TG PAM), contains linker |
| | AAATAGCAAGTTAAAATAAGGCTAGTCCGTTATC | sequence AACATTGA; hairpin SEQ ID |
| | AACTTGAAAAAGTGGCACCGAGTCGGTGCAACA | NO: 3591; end adaptations |
| | TTGACGCGTCTCTACGTGGGGGCGCGTTTT (SEQ | |
| | ID NO: 341) | |
| 342 | GAGGCTTCATACATCTTCCTTGTTTTAGAGCTAG | PE3 ngRNA (AG PAM), contains linker |
| | AAATAGCAAGTTAAAATAAGGCTAGTCCGTTATC | sequence AACATTGA; hairpin SEQ ID |
| | AACTTGAAAAAGTGGCACCGAGTCGGTGCAACA | NO: 3591; end adaptations |
| | TTGACGCGTCTCTACGTGGGGGCGCGTTTT (SEQ | |
| | ID NO: 342) | |
| 343 | GACTACTTACCATCTCTTTCAGTTTTAGAGCTAG | PE3 ngRNA (AG PAM), contains linker |
| | AAATAGCAAGTTAAAATAAGGCTAGTCCGTTATC | sequence AACATTGA; hairpin SEQ ID |
| | AACTTGAAAAAGTGGCACCGAGTCGGTGCAACA | NO: 3591; end adaptations |
| | TTGACGCGTCTCTACGTGGGGGCGCGTTTT (SEQ | |
| | ID NO: 343) | |

TABLE 33

| Sequence | | |
|---|---|---|
| Number | Sequence | Description |
| 2448 | CTTGTGATTATCAGTTT (SEQ ID NO: 2448) | PEgRNA spacer (TG; TGG PAM) |
| 2449 | TCTTGTGATTATCAGTTT (SEQ ID NO: 2449) | PEgRNA spacer (TG; TGG PAM) |
| 2450 | TTCTTGTGATTATCAGTTT (SEQ ID NO: 2450) | PEgRNA spacer (TG; TGG PAM) |
| 47 | TTTCTTGTGATTATCAGTTT (SEQ ID NO: 47) | PEgRNA spacer (TG; TGG PAM) |
| 2451 | CTTTCTTGTGATTATCAGTTT (SEQ ID NO: 2451) | PERNA spacer (TG; TGG PAM) |
| 2452 | TCTTTCTTGTGATTATCAGTTT (SEQ ID NO: 2452) | PEgRNA spacer (TG; TGG PAM) |
| 2453 | CTGAT | PBS |
| 2454 | CTGATA | PBS |
| 2455 | CTGATAA | PBS |
| 2456 | CTGATAAT | PBS |
| 2457 | CTGATAATC | PBS |
| 2458 | CTGATAATCA (SEQ ID NO: 2458) | PBS |
| 2459 | CTGATAATCAC (SEQ ID NO: 2459) | PBS |
| 2460 | CTGATAATCACA (SEQ ID NO: 2460) | PBS |
| 2461 | CTGATAATCACAA (SEQ ID NO: 2461) | PBS |
| 2462 | CTGATAATCACAAG (SEQ ID NO: 2462) | PBS |
| 2463 | CTGATAATCACAAGA (SEQ ID NO: 2463) | PBS |
| 2464 | CTGATAATCACAAGAA (SEQ ID NO: 2464) | PBS |
| 2465 | CTGATAATCACAAGAAA (SEQ ID NO: 2465) | PBS |
| 2466 | CTGATAATCACAAGAAAG (SEQ ID NO: 2466) | PBS |
| 2467 | CTGATAATCACAAGAAAGA (SEQ ID NO: 2467) | PBS |
| 2468 | CCCATACAGAAAGCTTCTGCATCCAAAA (SEQ ID | RTT |
| | NO: 2468) | |
| 2469 | TCCCATACAGAAAGCTTCTGCATCCAAAA (SEQ | RTT |
| | ID NO: 2469) | |
| 2470 | ATCCCATACAGAAAGCTTCTGCATCCAAAA (SEQ | RTT |
| | ID NO: 2470) | |
| 2471 | GATCCCATACAGAAAGCTTCTGCATCCAAAA | RTT |
| | (SEQ ID NO: 2471) | |
| 2472 | TGATCCCATACAGAAAGCTTCTGCATCCAAAA | RTT |
| | (SEQ ID NO: 2472) | |
| 2473 | CTGATCCCATACAGAAAGCTTCTGCATCCAAAA | RTT |
| | (SEQ ID NO: 2473) | |
| 2474 | CCTGATCCCATACAGAAAGCTTCTGCATCCAAAA | RTT |
| | (SEQ ID NO: 2474) | |
| 2475 | GCCTGATCCCATACAGAAAGCTTCTGCATCCAAA | RTT |
| | A (SEQ ID NO: 2475) | |
| 2476 | AGCCTGATCCCATACAGAAAGCTTCTGCATCCAA | RTT |
| | AA (SEQ ID NO: 2476) | |
| 2477 | AAGCCTGATCCCATACAGAAAGCTTCTGCATCCA | RTT |
| | AAA (SEQ ID NO: 2477) | |
| 2478 | GAAGCCTGATCCCATACAGAAAGCTTCTGCATCC | RTT |
| | AAAA (SEQ ID NO: 2478) | |
| 2479 | GGAAGCCTGATCCCATACAGAAAGCTTCTGCATC | RTT |
| | CAAAA (SEQ ID NO: 2479) | |
| 2480 | TGGAAGCCTGATCCCATACAGAAAGCTTCTGCAT | RTT |
| | CCAAAA (SEQ ID NO: 2480) | |
| 380 | AAAGCTTCTGCATCCAAAAC (SEQ ID NO: 380) | PE3 ngRNA spacer (TG PAM) |
| 4 | AACTGAGCCACGTGAAGACA (SEQ ID NO: 4) | PE3 ngRNA spacer (GG PAM) |
| 382 | AAGCCTGATCCCATACAGAA (SEQ ID NO: 382) | PE3b ngRNA spacer (AG PAM) |
| 195 | ACATCTTCCTTAGGAACTCC (SEQ ID NO: 195) | PE3 ngRNA spacer (TG; TGG PAM) |
| 196 | ACTACTTACCATCTCTTTCA (SEQ ID NO: 196) | PE3 ngRNA spacer (AG; AGG PAM) |
| 197 | ACTCCTGGAACTGAGCCACG (SEQ ID NO: 197) | PE3 ngRNA spacer (TG PAM) |
| 199 | AGGCTTCATACATCTTCCTT (SEQ ID NO: 199) | PE3 ngRNA spacer (AG; AGG PAM) |
| 200 | CATCTTCCTTAGGAACTCCT (SEQ ID NO: 200) | PE3 ngRNA spacer (GG PAM) |
| 201 | CCACGTGAAGACAGGTGTCT (SEQ ID NO: 201) | PE3 ngRNA spacer (TG PAM) |
| 202 | CCTGGAACTGAGCCACGTGA (SEQ ID NO: 202) | PE3 ngRNA spacer (AG PAM) |
| 203 | CGTGAAGACAGGTGTCTTGC (SEQ ID NO: 203) | PE3 ngRNA spacer (TG; TGG PAM) |
| 204 | CTACTTACCATCTCTTTCAA (SEQ ID NO: 204) | PE3 ngRNA spacer (GG PAM) |
| 205 | CTGAGCCACGTGAAGACAGG (SEQ ID NO: 205) | PE3 ngRNA spacer (TG PAM) |
| 206 | CTTAGGAACTCCTGGAACTG (SEQ ID NO: 206) | PE3 ngRNA spacer (AG PAM) |
| 208 | GAACTCCTGGAACTGAGCCA (SEQ ID NO: 208) | PE3 ngRNA spacer (CG PAM) |
| 209 | GAACTGAGCCACGTGAAGAC (SEQ ID NO: 209) | PE3 ngRNA spacer (AG; AGG PAM) |
| 383 | GATCCCATACAGAAAGCTTC (SEQ ID NO: 383) | PE3b ngRNA spacer (TG PAM) |
| 210 | GGCTTCATACATCTTCCTTA (SEQ ID NO: 210) | PE3 ngRNA spacer (GG PAM) |
| 211 | GGGTTTCCAAAGTGGAAGCC (SEQ ID NO: 211) | PE3 ngRNA spacer (TG PAM) |
| 212 | GTCTTGCTGGGTTTCCAAAG (SEQ ID NO: 212) | PE3 ngRNA spacer (TG; TGG PAM) |
| 213 | GTGAAGACAGGTGTCTTGCT (SEQ ID NO: 213) | PE3 ngRNA spacer (GG; GGG PAM) |
| 384 | GTGGAAGCCTGATCCCATAC (SEQ ID NO: 384) | PE3b ngRNA spacer (AG PAM) |
| 214 | GTGTCTTGCTGGGTTTCCAA (SEQ ID NO: 214) | PE3 ngRNA spacer (AG PAM) |
| 215 | TCCTTAGGAACTCCTGGAAC (SEQ ID NO: 215) | PE3 ngRNA spacer (TG PAM) |
| 216 | TCTTGCTGGGTTTCCAAAGT (SEQ ID NO: 216) | PE3 ngRNA spacer (GG PAM) |
| 217 | TGAAGACAGGTGTCTTGCTG (SEQ ID NO: 217) | PE3 ngRNA spacer (GG PAM) |
| 218 | TGCTGGGTTTCCAAAGTGGA (SEQ ID NO: 218) | PE3 ngRNA spacer (AG PAM) |
| 323 | GTCTTGCTGGGTTTCCAAAGGTTTTAGAGCTAGA | PE3 ngRNA (TG; TGG PAM) |
| | AATAGCAAGTTAAAATAAGGCTAGTCCGTTATCA | |
| | ACTTGAAAAAGTGGCACCGAGTCGGTGC (SEQ ID | |
| | NO: 323) | |
| 324 | GTGAAGACAGGTGTCTTGCTGTTTTAGAGCTAGA | PE3 ngRNA (GG; GGG PAM) |
| | AATAGCAAGTTAAAATAAGGCTAGTCCGTTATCA | |
| | ACTTGAAAAAGTGGCACCGAGTCGGTGC (SEQ ID | |
| | NO: 324) | |
| 325 | CGTGAAGACAGGTGTCTTGCGTTTTAGAGCTAGA | PE3 ngRNA (TG; TGG PAM) |
| | AATAGCAAGTTAAAATAAGGCTAGTCCGTTATCA | |
| | ACTTGAAAAAGTGGCACCGAGTCGGTGC (SEQ ID | |
| | NO: 325) | |
| 326 | GAACTGAGCCACGTGAAGACGTTTTAGAGCTAG | PE3 ngRNA (AG; AGG PAM) |
| | AAATAGCAAGTTAAAATAAGGCTAGTCCGTTATC | |
| | AACTTGAAAAAGTGGCACCGAGTCGGTGC (SEQ | |
| | ID NO: 326) | |
| 327 | ACATCTTCCTTAGGAACTCCGTTTTAGAGCTAGA | PE3 ngRNA (TG; TGG PAM) |
| | AATAGCAAGTTAAAATAAGGCTAGTCCGTTATCA | |
| | ACTTGAAAAAGTGGCACCGAGTCGGTGC (SEQ ID | |
| | NO: 327) | |
| 328 | AGGCTTCATACATCTTCCTTGTTTTAGAGCTAGA | PE3 ngRNA (AG; AGG PAM) |
| | AATAGCAAGTTAAAATAAGGCTAGTCCGTTATCA | |
| | ACTTGAAAAAGTGGCACCGAGTCGGTGC (SEQ ID | |
| | NO: 328) | |
| 329 | ACTACTTACCATCTCTTTCAGTTTTAGAGCTAGA | PE3 ngRNA (AG; AGG PAM) |
| | AATAGCAAGTTAAAATAAGGCTAGTCCGTTATCA | |
| | ACTTGAAAAAGTGGCACCGAGTCGGTGC (SEQ ID | |
| | NO: 329) | |
| 330 | GTCTTGCTGGGTTTCCAAAGGTTTTAGAGCTAGA | PE3 ngRNA (TG; TGG PAM), contains end |
| | AATAGCAAGTTAAAATAAGGCTAGTCCGTTATCA | adaptations |
| | ACTTGAAAAAGTGGCACCGAGTCGGTGCTTTT | |
| | (SEQ ID NO: 330) | |
| 331 | GTGAAGACAGGTGTCTTGCTGTTTTAGAGCTAGA | PE3 ngRNA (GG; GGG PAM), contains end |
| | AATAGCAAGTTAAAATAAGGCTAGTCCGTTATCA | adaptations |
| | ACTTGAAAAAGTGGCACCGAGTCGGTGCTTTT | |
| | (SEQ ID NO: 331) | |
| 332 | GAACTGAGCCACGTGAAGACGTTTTAGAGCTAG | PE3 ngRNA (AG; AGG PAM), contains end |
| | AAATAGCAAGTTAAAATAAGGCTAGTCCGTTATC | adaptations |
| | AACTTGAAAAAGTGGCACCGAGTCGGTGCTTTT | |
| | (SEQ ID NO: 332) | |
| 333 | GCGTGAAGACAGGTGTCTTGCGTTTTAGAGCTAG | PE3 ngRNA (TG; TGG PAM), contains end |
| | AAATAGCAAGTTAAAATAAGGCTAGTCCGTTATC | adaptations |
| | AACTTGAAAAAGTGGCACCGAGTCGGTGCTTTT | |
| | (SEQ ID NO: 333) | |
| 334 | GACATCTTCCTTAGGAACTCCGTTTTAGAGCTAG | PE3 ngRNA (TG; TGG PAM), contains end |
| | AAATAGCAAGTTAAAATAAGGCTAGTCCGTTATC | adaptations |
| | AACTTGAAAAAGTGGCACCGAGTCGGTGCTTTT | |
| | (SEQ ID NO: 334) | |
| 335 | GAGGCTTCATACATCTTCCTTGTTTTAGAGCTAG | PE3 ngRNA (AG; AGG PAM), contains end |
| | AAATAGCAAGTTAAAATAAGGCTAGTCCGTTATC | adaptations |
| | AACTTGAAAAAGTGGCACCGAGTCGGTGCTTTT | |
| | (SEQ ID NO: 335) | |
| 336 | GACTACTTACCATCTCTTTCAGTTTTAGAGCTAG | PE3 ngRNA (AG; AGG PAM), contains end |
| | AAATAGCAAGTTAAAATAAGGCTAGTCCGTTATC | adaptations |
| | AACTTGAAAAAGTGGCACCGAGTCGGTGCTTTT | |
| | (SEQ ID NO: 336) | |
| 337 | GTCTTGCTGGGTTTCCAAAGGTTTTAGAGCTAGA | PE3 ngRNA (TG; TGG PAM), contains linker |
| | AATAGCAAGTTAAAATAAGGCTAGTCCGTTATCA | sequence AACATTGA; hairpin SEQ ID |
| | ACTTGAAAAAGTGGCACCGAGTCGGTGCAACAT | NO: 3591; end adaptations |
| | TGACGCGTCTCTACGTGGGGGCGCGTTTT (SEQ | |
| | ID NO: 337) | |
| 338 | GTGAAGACAGGTGTCTTGCTGTTTTAGAGCTAGA | PE3 ngRNA (GG; GGG PAM), contains linker |
| | AATAGCAAGTTAAAATAAGGCTAGTCCGTTATCA | sequence AACATTGA; hairpin SEQ ID |
| | ACTTGAAAAAGTGGCACCGAGTCGGTGCAACAT | NO: 3591; end adaptations |
| | TGACGCGTCTCTACGTGGGGGCGCGTTTT (SEQ | |
| | ID NO: 338) | |
| 339 | GAACTGAGCCACGTGAAGACGTTTTAGAGCTAG | PE3 ngRNA (AG; AGG PAM), contains linker |
| | AAATAGCAAGTTAAAATAAGGCTAGTCCGTTATC | sequence AACATTGA; hairpin SEQ ID |
| | AACTTGAAAAAGTGGCACCGAGTCGGTGCAACA | NO: 3591; end adaptations |
| | TTGACGCGTCTCTACGTGGGGGCGCGTTTT (SEQ | |
| | ID NO: 339) | |
| 340 | GCGTGAAGACAGGTGTCTTGCGTTTTAGAGCTAG | PE3 ngRNA (TG; TGG PAM), contains linker |
| | AAATAGCAAGTTAAAATAAGGCTAGTCCGTTATC | sequence AACATTGA; hairpin SEQ ID |
| | AACTTGAAAAAGTGGCACCGAGTCGGTGCAACA | NO: 3591; end adaptations |
| | TTGACGCGTCTCTACGTGGGGGCGCGTTTT (SEQ | |
| | ID NO: 340) | |
| 341 | GACATCTTCCTTAGGAACTCCGTTTTAGAGCTAG | PE3 ngRNA (TG; TGG PAM), contains linker |
| | AAATAGCAAGTTAAAATAAGGCTAGTCCGTTATC | sequence AACATTGA; hairpin SEQ ID |
| | AACTTGAAAAAGTGGCACCGAGTCGGTGCAACA | NO: 3591; end adaptations |
| | TTGACGCGTCTCTACGTGGGGGCGCGTTTT (SEQ | |
| | ID NO: 341) | |
| 342 | GAGGCTTCATACATCTTCCTTGTTTTAGAGCTAG | PE3 ngRNA (AG; AGG PAM), contains linker |
| | AAATAGCAAGTTAAAATAAGGCTAGTCCGTTATC | sequence AACATTGA; hairpin SEQ ID |
| | AACTTGAAAAAGTGGCACCGAGTCGGTGCAACA | NO: 3591; end adaptations |
| | TTGACGCGTCTCTACGTGGGGGCGCGTTTT (SEQ | |
| | ID NO: 342) | |
| 343 | GACTACTTACCATCTCTTTCAGTTTTAGAGCTAG | PE3 ngRNA (AG; AGG PAM), contains linker |
| | AAATAGCAAGTTAAAATAAGGCTAGTCCGTTATC | sequence AACATTGA; hairpin SEQ ID |
| | AACTTGAAAAAGTGGCACCGAGTCGGTGCAACA | NO: 3591; end adaptations |
| | TTGACGCGTCTCTACGTGGGGGCGCGTTTT (SEQ | |
| | ID NO: 343) | |

TABLE 34

| Sequence | | |
|---|---|---|
| Number | Sequence | Description |
| 2481 | TGGATGCAGAAGCTTTC (SEQ ID NO: 2481) | PEgRNA spacer (TG PAM) |
| 2482 | TTGGATGCAGAAGCTTTC (SEQ ID NO: 2482) | PEgRNA spacer (TG PAM) |
| 2483 | TTTGGATGCAGAAGCTTTC (SEQ ID NO: 2483) | PEgRNA spacer (TG PAM) |
| 48 | TTTTGGATGCAGAAGCTTTC (SEQ ID NO: 48) | PERNA spacer (TG PAM) |
| 2484 | GTTTTGGATGCAGAAGCTTTC (SEQ ID NO: 2484) | PERNA spacer (TG PAM) |
| 2485 | AGTTTTGGATGCAGAAGCTTTC (SEQ ID NO: 2485) | PEgRNA spacer (TG PAM) |
| 2486 | AGCTT | PBS |
| 2487 | AGCTTC | PBS |
| 2488 | AGCTTCT | PBS |
| 2489 | AGCTTCTG | PBS |
| 2490 | AGCTTCTGC | PBS |
| 2491 | AGCTTCTGCA (SEQ ID NO: 2491) | PBS |
| 2492 | AGCTTCTGCAT (SEQ ID NO: 2492) | PBS |
| 2493 | AGCTTCTGCATC (SEQ ID NO: 2493) | PBS |
| 2494 | AGCTTCTGCATCC (SEQ ID NO: 2494) | PBS |
| 2495 | AGCTTCTGCATCCA (SEQ ID NO: 2495) | PBS |
| 2496 | AGCTTCTGCATCCAA (SEQ ID NO: 2496) | PBS |
| 2497 | AGCTTCTGCATCCAAA (SEQ ID NO: 2497) | PBS |
| 2498 | AGCTTCTGCATCCAAAA (SEQ ID NO: 2498) | PBS |
| 2499 | AGCTTCTGCATCCAAAAC (SEQ ID NO: 2499) | PBS |
| 2500 | AGCTTCTGCATCCAAAACT (SEQ ID NO: 2500) | PBS |
| 2501 | CCCATACAGAA (SEQ ID NO: 2501) | RTT |
| 2502 | TCCCATACAGAA (SEQ ID NO: 2502) | RTT |
| 2503 | ATCCCATACAGAA (SEQ ID NO: 2503) | RTT |
| 2504 | GATCCCATACAGAA (SEQ ID NO: 2504) | RTT |
| 2505 | TGATCCCATACAGAA (SEQ ID NO: 2505) | RTT |
| 2506 | CTGATCCCATACAGAA (SEQ ID NO: 2506) | RTT |
| 2507 | CCTGATCCCATACAGAA (SEQ ID NO: 2507) | RTT |
| 2508 | GCCTGATCCCATACAGAA (SEQ ID NO: 2508) | RTT |
| 2509 | AGCCTGATCCCATACAGAA (SEQ ID NO: 2509) | RTT |
| 382 | AAGCCTGATCCCATACAGAA (SEQ ID NO: 382) | RTT |
| 2510 | GAAGCCTGATCCCATACAGAA (SEQ ID NO: 2510) | RTT |
| 2511 | GGAAGCCTGATCCCATACAGAA (SEQ ID NO: | RTT |
| | 2511) | |
| 2512 | TGGAAGCCTGATCCCATACAGAA (SEQ ID NO: | RTT |
| | 2512) | |
| 2513 | GTGGAAGCCTGATCCCATACAGAA (SEQ ID NO: | RTT |
| | 2513) | |
| 2514 | AGTGGAAGCCTGATCCCATACAGAA (SEQ ID NO: | RTT |
| | 2514) | |
| 2515 | AAGTGGAAGCCTGATCCCATACAGAA (SEQ ID | RTT |
| | NO: 2515) | |
| 2516 | AAAGTGGAAGCCTGATCCCATACAGAA (SEQ ID | RTT |
| | NO: 2516) | |
| 2517 | CAAAGTGGAAGCCTGATCCCATACAGAA (SEQ ID | RTT |
| | NO: 2517) | |
| 2518 | CCAAAGTGGAAGCCTGATCCCATACAGAA (SEQ | RTT |
| | ID NO: 2518) | |
| 2519 | TCCAAAGTGGAAGCCTGATCCCATACAGAA (SEQ | RTT |
| | ID NO: 2519) | |
| 2520 | TTCCAAAGTGGAAGCCTGATCCCATACAGAA | RTT |
| | (SEQ ID NO: 2520) | |
| 2521 | TTTCCAAAGTGGAAGCCTGATCCCATACAGAA | RTT |
| | (SEQ ID NO: 2521) | |
| 2522 | GTTTCCAAAGTGGAAGCCTGATCCCATACAGAA | RTT |
| | (SEQ ID NO: 2522) | |
| 2523 | GGTTTCCAAAGTGGAAGCCTGATCCCATACAGA | RTT |
| | A (SEQ ID NO: 2523) | |
| 2524 | GGGTTTCCAAAGTGGAAGCCTGATCCCATACAG | RTT |
| | AA (SEQ ID NO: 2524) | |
| 2525 | TGGGTTTCCAAAGTGGAAGCCTGATCCCATACAG | RTT |
| | AA (SEQ ID NO: 2525) | |
| 2526 | CTGGGTTTCCAAAGTGGAAGCCTGATCCCATACA | RTT |
| | GAA (SEQ ID NO: 2526) | |
| 2527 | GCTGGGTTTCCAAAGTGGAAGCCTGATCCCATAC | RTT |
| | AGAA (SEQ ID NO: 2527) | |
| 2528 | TGCTGGGTTTCCAAAGTGGAAGCCTGATCCCATA | RTT |
| | CAGAA (SEQ ID NO: 2528) | |
| 2529 | TTGCTGGGTTTCCAAAGTGGAAGCCTGATCCCAT | RTT |
| | ACAGAA (SEQ ID NO: 2529) | |
| 1 | AACTGAGCCACGTGAAGACA (SEQ ID NO: 4) | PE3 ngRNA spacer (GG PAM) |
| 382 | AAGCCTGATCCCATACAGAA (SEQ ID NO: 382) | PE3b ngRNA spacer (AG PAM) |
| 195 | ACATCTTCCTTAGGAACTCC (SEQ ID NO: 195) | PE3 ngRNA spacer (TG PAM) |
| 196 | ACTACTTACCATCTCTTTCA (SEQ ID NO: 196) | PE3 ngRNA spacer (AG PAM) |
| 197 | ACTCCTGGAACTGAGCCACG (SEQ ID NO: 197) | PE3 ngRNA spacer (TG PAM) |
| 199 | AGGCTTCATACATCTTCCTT (SEQ ID NO: 199) | PE3 ngRNA spacer (AG PAM) |
| 200 | CATCTTCCTTAGGAACTCCT (SEQ ID NO: 200) | PE3 ngRNA spacer (GG PAM) |
| 201 | CCACGTGAAGACAGGTGTCT (SEQ ID NO: 201) | PE3 ngRNA spacer (TG PAM) |
| 202 | CCTGGAACTGAGCCACGTGA (SEQ ID NO: 202) | PE3 ngRNA spacer (AG PAM) |
| 203 | CGTGAAGACAGGTGTCTTGC (SEQ ID NO: 203) | PE3 ngRNA spacer (TG PAM) |
| 204 | CTACTTACCATCTCTTTCAA (SEQ ID NO: 204) | PE3 ngRNA spacer (GG PAM) |
| 205 | CTGAGCCACGTGAAGACAGG (SEQ ID NO: 205) | PE3 ngRNA spacer (TG PAM) |
| 206 | CTTAGGAACTCCTGGAACTG (SEQ ID NO: 206) | PE3 ngRNA spacer (AG PAM) |
| 208 | GAACTCCTGGAACTGAGCCA (SEQ ID NO: 208) | PE3 ngRNA spacer (CG PAM) |
| 209 | GAACTGAGCCACGTGAAGAC (SEQ ID NO: 209) | PE3 ngRNA spacer (AG PAM) |
| 210 | GGCTTCATACATCTTCCTTA (SEQ ID NO: 210) | PE3 ngRNA spacer (GG PAM) |
| 211 | GGGTTTCCAAAGTGGAAGCC (SEQ ID NO: 211) | PE3 ngRNA spacer (TG PAM) |
| 212 | GTCTTGCTGGGTTTCCAAAG (SEQ ID NO: 212) | PE3 ngRNA spacer (TG PAM) |
| 213 | GTGAAGACAGGTGTCTTGCT (SEQ ID NO: 213) | PE3 ngRNA spacer (GG PAM) |
| 384 | GTGGAAGCCTGATCCCATAC (SEQ ID NO: 384) | PE3b ngRNA spacer (AG PAM) |
| 214 | GTGTCTTGCTGGGTTTCCAA (SEQ ID NO: 214) | PE3 ngRNA spacer (AG PAM) |
| 215 | TCCTTAGGAACTCCTGGAAC (SEQ ID NO: 215) | PE3 ngRNA spacer (TG PAM) |
| 216 | TCTTGCTGGGTTTCCAAAGT (SEQ ID NO: 216) | PE3 ngRNA spacer (GG PAM) |
| 217 | TGAAGACAGGTGTCTTGCTG (SEQ ID NO: 217) | PE3 ngRNA spacer (GG PAM) |
| 218 | TGCTGGGTTTCCAAAGTGGA (SEQ ID NO: 218) | PE3 ngRNA spacer (AG PAM) |
| 323 | GTCTTGCTGGGTTTCCAAAGGTTTTAGAGCTAGA | PE3 ngRNA (TG PAM) |
| | AATAGCAAGTTAAAATAAGGCTAGTCCGTTATCA | |
| | ACTTGAAAAAGTGGCACCGAGTCGGTGC (SEQ ID | |
| | NO: 323) | |
| 324 | GTGAAGACAGGTGTCTTGCTGTTTTAGAGCTAGA | PE3 ngRNA (GG PAM) |
| | AATAGCAAGTTAAAATAAGGCTAGTCCGTTATCA | |
| | ACTTGAAAAAGTGGCACCGAGTCGGTGC (SEQ ID | |
| | NO: 324) | |
| 325 | CGTGAAGACAGGTGTCTTGCGTTTTAGAGCTAGA | PE3 ngRNA (TG PAM) |
| | AATAGCAAGTTAAAATAAGGCTAGTCCGTTATCA | |
| | ACTTGAAAAAGTGGCACCGAGTCGGTGC (SEQ ID | |
| | NO: 325) | |
| 326 | GAACTGAGCCACGTGAAGACGTTTTAGAGCTAG | PE3 ngRNA (AG PAM) |
| | AAATAGCAAGTTAAAATAAGGCTAGTCCGTTATC | |
| | AACTTGAAAAAGTGGCACCGAGTCGGTGC (SEQ | |
| | ID NO: 326) | |
| 327 | ACATCTTCCTTAGGAACTCCGTTTTAGAGCTAGA | PE3 ngRNA (TG PAM) |
| | AATAGCAAGTTAAAATAAGGCTAGTCCGTTATCA | |
| | ACTTGAAAAAGTGGCACCGAGTCGGTGC (SEQ ID | |
| | NO: 327) | |
| 328 | AGGCTTCATACATCTTCCTTGTTTTAGAGCTAGA | PE3 ngRNA (AG PAM) |
| | AATAGCAAGTTAAAATAAGGCTAGTCCGTTATCA | |
| | ACTTGAAAAAGTGGCACCGAGTCGGTGC (SEQ ID | |
| | NO: 328) | |
| 329 | ACTACTTACCATCTCTTTCAGTTTTAGAGCTAGA | PE3 ngRNA (AG PAM) |
| | AATAGCAAGTTAAAATAAGGCTAGTCCGTTATCA | |
| | ACTTGAAAAAGTGGCACCGAGTCGGTGC (SEQ ID | |
| | NO: 329) | |
| 330 | GTCTTGCTGGGTTTCCAAAGGTTTTAGAGCTAGA | PE3 ngRNA (TG PAM), contains end |
| | AATAGCAAGTTAAAATAAGGCTAGTCCGTTATCA | adaptations |
| | ACTTGAAAAAGTGGCACCGAGTCGGTGCTTTT | |
| | (SEQ ID NO: 330) | |
| 331 | GTGAAGACAGGTGTCTTGCTGTTTTAGAGCTAGA | PE3 ngRNA (GG PAM), contains end |
| | AATAGCAAGTTAAAATAAGGCTAGTCCGTTATCA | adaptations |
| | ACTTGAAAAAGTGGCACCGAGTCGGTGCTTTT | |
| | (SEQ ID NO: 331) | |
| 332 | GAACTGAGCCACGTGAAGACGTTTTAGAGCTAG | PE3 ngRNA (AG PAM), contains end |
| | AAATAGCAAGTTAAAATAAGGCTAGTCCGTTATC | adaptations |
| | AACTTGAAAAAGTGGCACCGAGTCGGTGCTTTT | |
| | (SEQ ID NO: 332) | |
| 333 | GCGTGAAGACAGGTGTCTTGCGTTTTAGAGCTAG | PE3 ngRNA (TG PAM), contains end |
| | AAATAGCAAGTTAAAATAAGGCTAGTCCGTTATC | adaptations |
| | AACTTGAAAAAGTGGCACCGAGTCGGTGCTTTT | |
| | (SEQ ID NO: 333) | |
| 334 | GACATCTTCCTTAGGAACTCCGTTTTAGAGCTAG | PE3 ngRNA (TG PAM), contains end |
| | AAATAGCAAGTTAAAATAAGGCTAGTCCGTTATC | adaptations |
| | AACTTGAAAAAGTGGCACCGAGTCGGTGCTTTT | |
| | (SEQ ID NO: 334) | |
| 335 | GAGGCTTCATACATCTTCCTTGTTTTAGAGCTAG | PE3 ngRNA (AG PAM), contains end |
| | AAATAGCAAGTTAAAATAAGGCTAGTCCGTTATC | adaptations |
| | AACTTGAAAAAGTGGCACCGAGTCGGTGCTTTT | |
| | (SEQ ID NO: 335) | |
| 336 | GACTACTTACCATCTCTTTCAGTTTTAGAGCTAG | PE3 ngRNA (AG PAM), contains end |
| | AAATAGCAAGTTAAAATAAGGCTAGTCCGTTATC | adaptations |
| | AACTTGAAAAAGTGGCACCGAGTCGGTGCTTTT | |
| | (SEQ ID NO: 336) | |
| 337 | GTCTTGCTGGGTTTCCAAAGGTTTTAGAGCTAGA | PE3 ngRNA (TG PAM), contains linker |
| | AATAGCAAGTTAAAATAAGGCTAGTCCGTTATCA | sequence AACATTGA; hairpin SEQ ID |
| | ACTTGAAAAAGTGGCACCGAGTCGGTGCAACAT | NO: 3591; end adaptations |
| | TGACGCGTCTCTACGTGGGGGCGCGTTTT (SEQ | |
| | ID NO: 337) | |
| 338 | GTGAAGACAGGTGTCTTGCTGTTTTAGAGCTAGA | PE3 ngRNA (GG PAM), contains linker |
| | AATAGCAAGTTAAAATAAGGCTAGTCCGTTATCA | sequence AACATTGA; hairpin SEQ ID |
| | ACTTGAAAAAGTGGCACCGAGTCGGTGCAACAT | NO: 3591; end adaptations |
| | TGACGCGTCTCTACGTGGGGGCGCGTTTT (SEQ | |
| | ID NO: 338 | |
| 339 | GAACTGAGCCACGTGAAGACGTTTTAGAGCTAG | PE3 ngRNA (AG PAM), contains linker |
| | AAATAGCAAGTTAAAATAAGGCTAGTCCGTTATC | sequence AACATTGA; hairpin SEQ ID |
| | AACTTGAAAAAGTGGCACCGAGTCGGTGCAACA | NO: 3591; end adaptations |
| | TTGACGCGTCTCTACGTGGGGGCGCGTTTT (SEQ | |
| | ID NO: 339) | |
| 340 | GCGTGAAGACAGGTGTCTTGCGTTTTAGAGCTAG | PE3 ngRNA (TG PAM), contains linker |
| | AAATAGCAAGTTAAAATAAGGCTAGTCCGTTATC | sequence AACATTGA; hairpin SEQ ID |
| | AACTTGAAAAAGTGGCACCGAGTCGGTGCAACA | NO: 3591; end adaptations |
| | TTGACGCGTCTCTACGTGGGGGCGCGTTTT (SEQ | |
| | ID NO: 340) | |
| 341 | GACATCTTCCTTAGGAACTCCGTTTTAGAGCTAG | PE3 ngRNA (TG PAM), contains linker |
| | AAATAGCAAGTTAAAATAAGGCTAGTCCGTTATC | sequence AACATTGA; hairpin SEQ ID |
| | AACTTGAAAAAGTGGCACCGAGTCGGTGCAACA | NO: 3591; end adaptations |
| | TTGACGCGTCTCTACGTGGGGGCGCGTTTT (SEQ | |
| | ID NO: 341) | |
| 342 | GAGGCTTCATACATCTTCCTTGTTTTAGAGCTAG | PE3 ngRNA (AG PAM), contains linker |
| | AAATAGCAAGTTAAAATAAGGCTAGTCCGTTATC | sequence AACATTGA; hairpin SEQ ID |
| | AACTTGAAAAAGTGGCACCGAGTCGGTGCAACA | NO: 3591; end adaptations |
| | TTGACGCGTCTCTACGTGGGGGCGCGTTTT (SEQ | |
| | ID NO: 342) | |
| 343 | GACTACTTACCATCTCTTTCAGTTTTAGAGCTAG | PE3 ngRNA (AG PAM), contains linker |
| | AAATAGCAAGTTAAAATAAGGCTAGTCCGTTATC | sequence AACATTGA; hairpin SEQ ID |
| | AACTTGAAAAAGTGGCACCGAGTCGGTGCAACA | NO: 3591; end adaptations |
| | TTGACGCGTCTCTACGTGGGGGCGCGTTTT (SEQ | |
| | ID NO: 343) | |

TABLE 35

| Sequence | | |
|---|---|---|
| Number | Sequence | Description |
| 2530 | GTCTTGGGTATGCACCT (SEQ ID NO: 2530) | PEgRNA spacer (ATAGAT PAM) |
| 2531 | GGTCTTGGGTATGCACCT (SEQ ID NO: 2531) | PEgRNA spacer (ATAGAT PAM) |
| 2532 | AGGTCTTGGGTATGCACCT (SEQ ID NO: 2532) | PERNA spacer (ATAGAT PAM) |
| 2533 | AAGGTCTTGGGTATGCACCT (SEQ ID NO: 2533) | PEgRNA spacer (ATAGAT PAM) |
| 2534 | CAAGGTCTTGGGTATGCACCT (SEQ ID NO: 2534) | PEgRNA spacer (ATAGAT PAM) |
| 2535 | TCAAGGTCTTGGGTATGCACCT (SEQ ID NO: 2535) | PEgRNA spacer (ATAGAT PAM) |
| 2536 | TGCAT | PBS |
| 2537 | TGCATA | PBS |
| 2538 | TGCATAC | PBS |
| 2539 | TGCATACC | PBS |
| 2540 | TGCATACCC | PBS |
| 2541 | TGCATACCCA (SEQ ID NO: 2541) | PBS |
| 2542 | TGCATACCCAA (SEQ ID NO: 2542) | PBS |
| 2543 | TGCATACCCAAG (SEQ ID NO: 2543) | PBS |
| 2544 | TGCATACCCAAGA (SEQ ID NO: 2544) | PBS |
| 2545 | TGCATACCCAAGAC (SEQ ID NO: 2545) | PBS |
| 2546 | TGCATACCCAAGACC (SEQ ID NO: 2546) | PBS |
| 2547 | TGCATACCCAAGACCT (SEQ ID NO: 2547) | PBS |
| 2548 | TGCATACCCAAGACCTT (SEQ ID NO: 2548) | PBS |
| 2549 | TGCATACCCAAGACCTTG (SEQ ID NO: 2549) | PBS |
| 2550 | TGCATACCCAAGACCTTGA (SEQ ID NO: 2550) | PBS |
| 2551 | TCACATTTTTAAGCAAACCAGGATAGTAATCTAT | RTT*1 |
| | AGG (SEQ ID NO: 2551) | |
| 2552 | TCACATTTTTAAGCAAACCAGGATAGTAGTCTAT | RTT*1,2 (ATAGAT-to-ATAGAC PAM |
| | AGG (SEQ ID NO: 2552) | silencing edit) |
| 2553 | CTCACATTTTTAAGCAAACCAGGATAGTAATCTA | RTT*1 |
| | TAGG (SEQ ID NO: 2553) | |
| 2554 | CTCACATTTTTAAGCAAACCAGGATAGTAGTCTA | RTT*1,2 (ATAGAT-to-ATAGAC PAM |
| | TAGG (SEQ ID NO: 2554) | silencing edit) |
| 2555 | ACTCACATTTTTAAGCAAACCAGGATAGTAATCT | RTT*1 |
| | ATAGG (SEQ ID NO: 2555) | |
| 2556 | ACTCACATTTTTAAGCAAACCAGGATAGTAGTCT | RTT*1,2 (ATAGAT-to-ATAGAC PAM |
| | ATAGG (SEQ ID NO: 2556) | silencing edit) |
| 2557 | TACTCACATTTTTAAGCAAACCAGGATAGTAATC | RTT*1 |
| | TATAGG (SEQ ID NO: 2557) | |
| 2558 | TACTCACATTTTTAAGCAAACCAGGATAGTAGTC | RTT*1,2 (ATAGAT-to-ATAGAC PAM |
| | TATAGG (SEQ ID NO: 2558) | silencing edit) |
| 2559 | AAACATCTCTTCTGGAGGAC (SEQ ID NO: 2559) | PE3 ngRNA spacer (TGAAAT PAM) |
| 2560 | ACTCACATTTTTAAGCAAAC (SEQ ID NO: 2560) | PE3b*1 ngRNA spacer (CAGGAT PAM) |
| 2561 | ATTTTTAAGCAAACCAGGAT (SEQ ID NO: 2561) | PE3 ngRNA spacer (AGTAAT PAM) |
| 2562 | CACATTTTTAAGCAAACCAG (SEQ ID NO: 2562) | PE3 ngRNA spacer (GATAGT PAM) |
| 2563 | CATTAAACATTTCAAAAGTG (SEQ ID NO: 2563) | PE3 ngRNA spacer (ATAAAT PAM) |
| 2564 | CATTCAGCATTAAACATTTC (SEQ ID NO: 2564) | PE3 ngRNA spacer (AAAAGT PAM) |
| 2565 | CATTTCAAAAGTGATAAATT (SEQ ID NO: 2565) | PE3 ngRNA spacer (TTAAAT PAM) |
| 2566 | GCAAACCAGGATAGTAATCT (SEQ ID NO: 2566) | PE3 ngRNA spacer (ATAGGT PAM) |
| 2567 | GCAAACCAGGATAGTAGTCT (SEQ ID NO: 2567) | PE3b*2 ngRNA spacer (ATAGGT PAM) |
| 2568 | TATTTCCATTTACTCTTTTT (SEQ ID NO: 2568) | PE3 ngRNA spacer (GCTGAT PAM) |
| 2569 | TCAGCATTAAACATTTCAAA (SEQ ID NO: 2569) | PE3 ngRNA spacer (AGTGAT PAM) |

TABLE 36

| Sequence | | |
|---|---|---|
| Number | Sequence | Description |
| 2570 | ATTAAACATTTCAAAAG (SEQ ID NO: 2570) | PEgRNA spacer (TG; TGA PAM) |
| 2571 | CATTAAACATTTCAAAAG (SEQ ID NO: 2571) | PEgRNA spacer (TG; TGA PAM) |
| 2572 | GCATTAAACATTTCAAAAG (SEQ ID NO: 2572) | PEgRNA spacer (TG; TGA PAM) |
| 2573 | AGCATTAAACATTTCAAAAG (SEQ ID NO: 2573) | PEgRNA spacer (TG; TGA PAM) |
| 2574 | CAGCATTAAACATTTCAAAAG (SEQ ID NO: 2574) | PEgRNA spacer (TG; TGA PAM) |
| 2575 | TCAGCATTAAACATTTCAAAAG (SEQ ID NO: | PEgRNA spacer (TG; TGA PAM) |
| | 2575) | |
| 2576 | TTGAA | PBS |
| 2577 | TTGAAA | PBS |
| 2578 | TTGAAAT | PBS |
| 2579 | TTGAAATG | PBS |
| 2580 | TTGAAATGT | PBS |
| 2581 | TTGAAATGTT (SEQ ID NO: 2581) | PBS |
| 2582 | TTGAAATGTTT (SEQ ID NO: 2582) | PBS |
| 2583 | TTGAAATGTTTA (SEQ ID NO: 2583) | PBS |
| 2584 | TTGAAATGTTTAA (SEQ ID NO: 2584) | PBS |
| 2585 | TTGAAATGTTTAAT (SEQ ID NO: 2585) | PBS |
| 2586 | TTGAAATGTTTAATG (SEQ ID NO: 2586) | PBS |
| 2587 | TTGAAATGTTTAATGC (SEQ ID NO: 2587) | PBS |
| 2588 | TTGAAATGTTTAATGCT (SEQ ID NO: 2588) | PBS |
| 2589 | TTGAAATGTTTAATGCTG (SEQ ID NO: 2589) | PBS |
| 2590 | TTGAAATGTTTAATGCTGA (SEQ ID NO: 2590) | PBS |
| 2591 | AGTATTTAAAATTTATCACTT (SEQ ID NO: 2591) | RTT |
| 2592 | GAGTATTTAAAATTTATCACTT (SEQ ID NO: 2592) | RTT |
| 2593 | TGAGTATTTAAAATTTATCACTT (SEQ ID NO: | RTT |
| | 2593) | |
| 2594 | GTGAGTATTTAAAATTTATCACTT (SEQ ID NO: | RTT |
| | 2594) | |
| 2595 | TGTGAGTATTTAAAATTTATCACTT (SEQ ID NO: | RTT |
| | 2595) | |
| 2596 | ATGTGAGTATTTAAAATTTATCACTT (SEQ ID NO: | RTT |
| | 2596) | |
| 2597 | AATGTGAGTATTTAAAATTTATCACTT (SEQ ID | RTT |
| | NO: 2597) | |
| 2598 | AAATGTGAGTATTTAAAATTTATCACTT (SEQ ID | RTT |
| | NO: 2598) | |
| 2599 | AAAATGTGAGTATTTAAAATTTATCACTT (SEQ ID | RTT |
| | NO: 2599) | |
| 2600 | AAAAATGTGAGTATTTAAAATTTATCACTT (SEQ | RTT |
| | ID NO: 2600) | |
| 2601 | TAAAAATGTGAGTATTTAAAATTTATCACTT | RTT |
| | (SEQ ID NO: 2601) | |
| 2602 | TTAAAAATGTGAGTATTTAAAATTTATCACTT | RTT |
| | (SEQ ID NO: 2602) | |
| 2603 | CTTAAAAATGTGAGTATTTAAAATTTATCACTT | RTT |
| | (SEQ ID NO: 2603) | |
| 2604 | GCTTAAAAATGTGAGTATTTAAAATTTATCACTT | RTT |
| | (SEQ ID NO: 2604) | |
| 2605 | TGCTTAAAAATGTGAGTATTTAAAATTTATCACT | RTT |
| | T (SEQ ID NO: 2605) | |
| 2606 | TTGCTTAAAAATGTGAGTATTTAAAATTTATCAC | RTT |
| | TT (SEQ ID NO: 2606) | |
| 2607 | TTTGCTTAAAAATGTGAGTATTTAAAATTTATCA | RTT |
| | CTT (SEQ ID NO: 2607) | |
| 2608 | GTTTGCTTAAAAATGTGAGTATTTAAAATTTATC | RTT |
| | ACTT (SEQ ID NO: 2608) | |
| 2609 | GGTTTGCTTAAAAATGTGAGTATTTAAAATTTAT | RTT |
| | CACTT (SEQ ID NO: 2609) | |
| 2610 | TGGTTTGCTTAAAAATGTGAGTATTTAAAATTTA | RTT |
| | TCACTT (SEQ ID NO: 2610) | |
| 2611 | AAGTTGCTCTTTTCACTCAA (SEQ ID NO: 2611) | PE3 ngRNA spacer (GG PAM) |
| 2612 | ATACTTTCAGCACTCAGATT (SEQ ID NO: 2612) | PE3 ngRNA spacer (TG; TGA PAM) |
| 2613 | CACCTATAGATTACTATCCT (SEQ ID NO: 2613) | PE3 ngRNA spacer (GG PAM) |
| 2614 | CTCAGATTTGATAAAGAAGT (SEQ ID NO: 2614) | PE3 ngRNA spacer (TG PAM) |
| 2615 | CTCATATACTTTCAGCACTC (SEQ ID NO: 2615) | PE3 ngRNA spacer (AG; AGA PAM) |
| 2616 | CTCTTTTCACTCAAGGTCTT (SEQ ID NO: 2616) | PE3 ngRNA spacer (GG PAM) |
| 2617 | CTGGTTTGCTTAAAAATGTG (SEQ ID NO: 2617) | PE3 ngRNA spacer (TG PAM) |
| 2618 | GAAGTTGCTCTTTTCACTCA (SEQ ID NO: 2618) | PE3 ngRNA spacer (AG PAM) |
| 2619 | GCACCTATAGATTACTATCC (SEQ ID NO: 2619) | PE3 ngRNA spacer (TG PAM) |
| 2620 | GCACTCAGATTTGATAAAGA (SEQ ID NO: 2620) | PE3 ngRNA spacer (AG PAM) |
| 2621 | GCTCTTTTCACTCAAGGTCT (SEQ ID NO: 2621) | PE3 ngRNA spacer (TG PAM) |
| 2622 | GGTCTTGGGTATGCACCTAT (SEQ ID NO: 2622) | PE3 ngRNA spacer (AG; AGA PAM) |
| 2623 | GTATTATCTCATATACTTTC (SEQ ID NO: 2623) | PE3 ngRNA spacer (AG PAM) |
| 2624 | TATAGATTACTATCCTGGTT (SEQ ID NO: 2624) | PE3 ngRNA spacer (TG PAM) |
| 2625 | TATCCTGGTTTGCTTAAAAA (SEQ ID NO: 2625) | PE3 ngRNA spacer (TG PAM) |
| 2626 | TATTTAAAATTTATCACTTT (SEQ ID NO: 2626) | PE3 ngRNA spacer (TG; TGA PAM) |
| 2627 | TCAGCACTCAGATTTGATAA (SEQ ID NO: 2627) | PE3 ngRNA spacer (AG; AGA PAM) |
| 2628 | TCCTGGTTTGCTTAAAAATG (SEQ ID NO: 2628) | PE3 ngRNA spacer (TG PAM) |
| 2629 | TCTTTTCACTCAAGGTCTTG (SEQ ID NO: 2629) | PE3 ngRNA spacer (GG PAM) |
| 2630 | TTCACTCAAGGTCTTGGGTA (SEQ ID NO: 2630) | PE3 ngRNA spacer (TG PAM) |

TABLE 37

| Sequence | | |
|---|---|---|
| Number | Sequence | Description |
| 2631 | TCTTGGGTATGCACCTA (SEQ ID NO: 2631) | PEgRNA spacer (TAG PAM) |
| 2632 | GTCTTGGGTATGCACCTA (SEQ ID NO: 2632) | PEgRNA spacer (TAG PAM) |
| 2633 | GGTCTTGGGTATGCACCTA (SEQ ID NO: 2633) | PERNA spacer (TAG PAM) |
| 2634 | AGGTCTTGGGTATGCACCTA (SEQ ID NO: 2634) | PERNA spacer (TAG PAM) |
| 2635 | AAGGTCTTGGGTATGCACCTA (SEQ ID NO: 2635) | PEgRNA spacer (TAG PAM) |
| 2636 | CAAGGTCTTGGGTATGCACCTA (SEQ ID NO: 2636) | PEgRNA spacer (TAG PAM) |
| 2637 | GTGCA | PBS |
| 2638 | GTGCAT | PBS |
| 2639 | GTGCATA | PBS |
| 2640 | GTGCATAC | PBS |
| 2641 | GTGCATACC | PBS |
| 2642 | GTGCATACCC (SEQ ID NO: 2642) | PBS |
| 2643 | GTGCATACCCA (SEQ ID NO: 2643) | PBS |
| 2644 | GTGCATACCCAA (SEQ ID NO: 2644) | PBS |
| 2645 | GTGCATACCCAAG (SEQ ID NO: 2645) | PBS |
| 2646 | GTGCATACCCAAGA (SEQ ID NO: 2646) | PBS |
| 2647 | GTGCATACCCAAGAC (SEQ ID NO: 2647) | PBS |
| 2648 | GTGCATACCCAAGACC (SEQ ID NO: 2648) | PBS |
| 2649 | GTGCATACCCAAGACCT (SEQ ID NO: 2649) | PBS |
| 2650 | GTGCATACCCAAGACCTT (SEQ ID NO: 2650) | PBS |
| 2651 | GTGCATACCCAAGACCTTG (SEQ ID NO: 2651) | PBS |
| 2652 | TCACATTTTTAAGCAAACCAGGATAGTAATCAAT | RTT*1,2,4 (TAG-to-TTG PAM silencing edit) |
| | AG (SEQ ID NO: 2652) | |
| 2653 | TCACATTTTTAAGCAAACCAGGATAGTAATCGAT | RTT*1,3,4 (TAG-to-TCG PAM silencing edit) |
| | AG (SEQ ID NO: 2653) | |
| 2654 | TCACATTTTTAAGCAAACCAGGATAGTAATCTAT | RTT*1,4 |
| | AG (SEQ ID NO: 2654) | |
| 2655 | CTCACATTTTTAAGCAAACCAGGATAGTAATCAA | RTT*1,2,4 (TAG-to-TTG PAM silencing edit) |
| | TAG (SEQ ID NO: 2655) | |
| 2656 | CTCACATTTTTAAGCAAACCAGGATAGTAATCGA | RTT*1,3,4 (TAG-to-TCG PAM silencing edit) |
| | TAG (SEQ ID NO: 2656) | |
| 2657 | CTCACATTTTTAAGCAAACCAGGATAGTAATCTA | RTT*1,4 |
| | TAG (SEQ ID NO: 2657) | |
| 2658 | ACTCACATTTTTAAGCAAACCAGGATAGTAATCA | RTT*1,2,4 (TAG-to-TTG PAM silencing edit) |
| | ATAG (SEQ ID NO: 2658) | |
| 2659 | ACTCACATTTTTAAGCAAACCAGGATAGTAATCG | RTT*1,3,4 (TAG-to-TCG PAM silencing edit) |
| | ATAG (SEQ ID NO: 2659) | |
| 2660 | ACTCACATTTTTAAGCAAACCAGGATAGTAATCT | RTT*1,4 |
| | ATAG (SEQ ID NO: 2660) | |
| 2661 | TACTCACATTTTTAAGCAAACCAGGATAGTAATC | RTT*1,2,4 (TAG-to-TTG PAM silencing edit) |
| | AATAG (SEQ ID NO: 2661) | |
| 2662 | TACTCACATTTTTAAGCAAACCAGGATAGTAATC | RTT*1,3,4 (TAG-to-TCG PAM silencing edit) |
| | GATAG (SEQ ID NO: 2662) | |
| 2663 | TACTCACATTTTTAAGCAAACCAGGATAGTAATC | RTT*1,4 |
| | TATAG (SEQ ID NO: 2663) | |
| 2664 | ATACTCACATTTTTAAGCAAACCAGGATAGTAAT | RTT*1,2,4 (TAG-to-TTG PAM silencing edit) |
| | CAATAG (SEQ ID NO: 2664) | |
| 2665 | ATACTCACATTTTTAAGCAAACCAGGATAGTAAT | RTT*1,3,4 (TAG-to-TCG PAM silencing edit) |
| | CGATAG (SEQ ID NO: 2665) | |
| 2666 | ATACTCACATTTTTAAGCAAACCAGGATAGTAAT | RTT*1,4 |
| | CTATAG (SEQ ID NO: 2666) | |
| 2560 | ACTCACATTTTTAAGCAAAC (SEQ ID NO: 2560) | PE3b*1 ngRNA spacer (CAG PAM) |
| 2667 | CAAACCAGGATAGTAATCAA (SEQ ID NO: 2667) | PE3b*2 ngRNA spacer (TAG PAM) |
| 2668 | CAAACCAGGATAGTAATCGA (SEQ ID NO: 2668) | PE3b*3 ngRNA spacer (TAG PAM) |
| 2669 | CAAACCAGGATAGTAATCTA (SEQ ID NO: 2669) | PE3 ngRNA spacer (TAG PAM) |
| 2670 | CATTTTTAAGCAAACCAGGA (SEQ ID NO: 2670) | PE3 ngRNA spacer (TAG PAM) |
| 2671 | CTTTTTGCTGATGGCACATT (SEQ ID NO: 2671) | PE3 ngRNA spacer (CAG PAM) |
| 2672 | TTCAGCATTAAACATTTCAA (SEQ ID NO: 2672) | PE3 ngRNA spacer (AAG PAM) |
| 2673 | TTTTAAATACTCACATTTTT (SEQ ID NO: 2673) | PE3b*4 ngRNA spacer (AAG PAM) |

TABLE 38

| Sequence | | |
|---|---|---|
| Number | Sequence | Description |
| 2674 | CACCTATAGATTACTAT (SEQ ID NO: 2674) | PEgRNA spacer (CCTGGT PAM) |
| 2675 | GCACCTATAGATTACTAT (SEQ ID NO: 2675) | PEgRNA spacer (CCTGGT PAM) |
| 2676 | TGCACCTATAGATTACTAT (SEQ ID NO: 2676) | PEgRNA spacer (CCTGGT PAM) |
| 2677 | ATGCACCTATAGATTACTAT (SEQ ID NO: 2677) | PEgRNA spacer (CCTGGT PAM) |
| 2678 | TATGCACCTATAGATTACTAT (SEQ ID NO: 2678) | PERNA spacer (CCTGGT PAM) |
| 2679 | GTATGCACCTATAGATTACTAT (SEQ ID NO: 2679) | PEgRNA spacer (CCTGGT PAM) |
| 2680 | GTAAT | PBS |
| 2681 | GTAATC | PBS |
| 2682 | GTAATCT | PBS |
| 2683 | GTAATCTA | PBS |
| 2684 | GTAATCTAT | PBS |
| 2685 | GTAATCTATA (SEQ ID NO: 2685) | PBS |
| 2686 | GTAATCTATAG (SEQ ID NO: 2686) | PBS |
| 2687 | GTAATCTATAGG (SEQ ID NO: 2687) | PBS |
| 2688 | GTAATCTATAGGT (SEQ ID NO: 2688) | PBS |
| 2689 | GTAATCTATAGGTG (SEQ ID NO: 2689) | PBS |
| 2690 | GTAATCTATAGGTGC (SEQ ID NO: 2690) | PBS |
| 2691 | GTAATCTATAGGTGCA (SEQ ID NO: 2691) | PBS |
| 2692 | GTAATCTATAGGTGCAT (SEQ ID NO: 2692) | PBS |
| 2693 | GTAATCTATAGGTGCATA (SEQ ID NO: 2693) | PBS |
| 2694 | GTAATCTATAGGTGCATAC (SEQ ID NO: 2694) | PBS |
| 2695 | TCACATTTTTAAGCAAACCAGGATA (SEQ ID NO: | RTT*1 |
| | 2695) | |
| 2696 | TCACATTTTTAAGCAACCCAGGATA (SEQ ID NO: | RTT*2,5,8 (CCTGGT-to-CCTGGG PAM |
| | 2696) | silencing edit) |
| 2697 | TCACATTTTTAAGCAAGCCAGGATA (SEQ ID NO: | RTT*3,6,9 (CCTGGT-to-CCTGGC PAM |
| | 2697) | silencing edit) |
| 2698 | TCACATTTTTAAGCAATCCAGGATA (SEQ ID NO: | RTT*4,7,10 (CCTGGT-to-CCTGGA PAM |
| | 2698) | silencing edit) |
| 2699 | CTCACATTTTTAAGCAAACCAGGATA (SEQ ID | RTT*1 |
| | NO: 2699) | |
| 2700 | CTCACATTTTTAAGCAACCCAGGATA (SEQ ID | RTT*2,5,8 (CCTGGT-to-CCTGGG PAM |
| | NO: 2700) | silencing edit) |
| 2701 | CTCACATTTTTAAGCAAGCCAGGATA (SEQ ID | RTT*3,6,9 (CCTGGT-to-CCTGGC PAM |
| | NO: 2701) | silencing edit) |
| 2702 | CTCACATTTTTAAGCAATCCAGGATA (SEQ ID | RTT*4,7,10 (CCTGGT-to-CCTGGA PAM |
| | NO: 2702) | silencing edit) |
| 2703 | ACTCACATTTTTAAGCAAACCAGGATA (SEQ ID | RTT*1 |
| | NO: 2703) | |
| 2704 | ACTCACATTTTTAAGCAACCCAGGATA (SEQ ID | RTT*2,5,8 (CCTGGT-to-CCTGGG PAM |
| | NO: 2704) | silencing edit) |
| 2705 | ACTCACATTTTTAAGCAAGCCAGGATA (SEQ ID | RTT*3,6,9 (CCTGGT-to-CCTGGC PAM |
| | NO: 2705) | silencing edit) |
| 2706 | ACTCACATTTTTAAGCAATCCAGGATA (SEQ ID | RTT*4,7,10 (CCTGGT-to-CCTGGA PAM |
| | NO: 2706) | silencing edit) |
| 2707 | TACTCACATTTTTAAGCAAACCAGGATA (SEQ ID | RTT*1 |
| | NO: 2707) | |
| 2708 | TACTCACATTTTTAAGCAACCCAGGATA (SEQ ID | RTT*2,5,8 (CCTGGT-to-CCTGGG PAM |
| | NO: 2708) | silencing edit) |
| 2709 | TACTCACATTTTTAAGCAAGCCAGGATA (SEQ ID | RTT*3,6,9 (CCTGGT-to-CCTGGC PAM |
| | NO: 2709) | silencing edit) |
| 2710 | TACTCACATTTTTAAGCAATCCAGGATA (SEQ ID | RTT*4,7,10 (CCTGGT-to-CCTGGA PAM |
| | NO: 2710) | silencing edit) |
| 2711 | ATACTCACATTTTTAAGCAAACCAGGATA (SEQ | RTT*1 |
| | ID NO: 2711) | |
| 2712 | ATACTCACATTTTTAAGCAACCCAGGATA (SEQ | RTT*2,5,8 (CCTGGT-to-CCTGGG PAM |
| | ID NO: 2712) | silencing edit) |
| 2713 | ATACTCACATTTTTAAGCAAGCCAGGATA (SEQ | RTT*3,6,9 (CCTGGT-to-CCTGGC PAM |
| | ID NO: 2713) | silencing edit) |
| 2714 | ATACTCACATTTTTAAGCAATCCAGGATA (SEQ | RTT*4,7,10 (CCTGGT-to-CCTGGA PAM |
| | ID NO: 2714) | silencing edit) |
| 2715 | AATACTCACATTTTTAAGCAAACCAGGATA (SEQ | RTT*1 |
| | ID NO: 2715) | |
| 2716 | AATACTCACATTTTTAAGCAACCCAGGATA (SEQ | RTT*2,5,8 (CCTGGT-to-CCTGGG PAM |
| | ID NO: 2716) | silencing edit) |
| 2717 | AATACTCACATTTTTAAGCAAGCCAGGATA (SEQ | RTT*3,6,9 (CCTGGT-to-CCTGGC PAM |
| | ID NO: 2717) | silencing edit) |
| 2718 | AATACTCACATTTTTAAGCAATCCAGGATA (SEQ | RTT*4,7,10 (CCTGGT-to-CCTGGA PAM |
| | ID NO: 2718) | silencing edit) |
| 2719 | AAATACTCACATTTTTAAGCAAACCAGGATA | RTT*1 |
| | (SEQ ID NO: 2719) | |
| 2720 | AAATACTCACATTTTTAAGCAACCCAGGATA | RTT*2,5,8 (CCTGGT-to-CCTGGG PAM |
| | (SEQ ID NO: 2720) | silencing edit) |
| 2721 | AAATACTCACATTTTTAAGCAAGCCAGGATA | RTT*3,6,9 (CCTGGT-to-CCTGGC PAM |
| | (SEQ ID NO: 2721) | silencing edit) |
| 2722 | AAATACTCACATTTTTAAGCAATCCAGGATA | RTT*4,7,10 (CCTGGT-to-CCTGGA PAM |
| | (SEQ ID NO: 2722) | silencing edit) |
| 2723 | TAAATACTCACATTTTTAAGCAAACCAGGATA | RTT*1 |
| | (SEQ ID NO: 2723) | |
| 2724 | TAAATACTCACATTTTTAAGCAACCCAGGATA | RTT*2,5,8 (CCTGGT-to-CCTGGG PAM |
| | (SEQ ID NO: 2724) | silencing edit) |
| 2725 | TAAATACTCACATTTTTAAGCAAGCCAGGATA | RTT*3,6,9 (CCTGGT-to-CCTGGC PAM |
| | (SEQ ID NO: 2725) | silencing edit) |
| 2726 | TAAATACTCACATTTTTAAGCAATCCAGGATA | RTT*4,7,10 (CCTGGT-to-CCTGGA PAM |
| | (SEQ ID NO: 2726) | silencing edit) |
| 2727 | TTAAATACTCACATTTTTAAGCAAACCAGGATA | RTT*1 |
| | (SEQ ID NO: 2727) | |
| 2728 | TTAAATACTCACATTTTTAAGCAACCCAGGATA | RTT*2,5,8 (CCTGGT-to-CCTGGG PAM |
| | (SEQ ID NO: 2728) | silencing edit) |
| 2729 | TTAAATACTCACATTTTTAAGCAAGCCAGGATA | RTT*3,6,9 (CCTGGT-to-CCTGGC PAM |
| | (SEQ ID NO: 2729) | silencing edit) |
| 2730 | TTAAATACTCACATTTTTAAGCAATCCAGGATA | RTT*4,7,10 (CCTGGT-to-CCTGGA PAM |
| | (SEQ ID NO: 2730) | silencing edit) |
| 2731 | TTTAAATACTCACATTTTTAAGCAAACCAGGATA | RTT*1 |
| | (SEQ ID NO: 2731) | |
| 2732 | TTTAAATACTCACATTTTTAAGCAACCCAGGATA | RTT*2,5,8 (CCTGGT-to-CCTGGG PAM |
| | (SEQ ID NO: 2732) | silencing edit) |
| 2733 | TTTAAATACTCACATTTTTAAGCAAGCCAGGATA | RTT*3,6,9 (CCTGGT-to-CCTGGC PAM |
| | (SEQ ID NO: 2733) | silencing edit) |
| 2734 | TTTAAATACTCACATTTTTAAGCAATCCAGGATA | RTT*4,7,10 (CCTGGT-to-CCTGGA PAM |
| | (SEQ ID NO: 2734) | silencing edit) |
| 2735 | TTTTAAATACTCACATTTTTAAGCAAACCAGGAT | RTT*1 |
| | A (SEQ ID NO: 2735) | |
| 2736 | TTTTAAATACTCACATTTTTAAGCAACCCAGGAT | RTT*2,5,8 (CCTGGT-to-CCTGGG PAM |
| | A (SEQ ID NO: 2736) | silencing edit) |
| 2737 | TTTTAAATACTCACATTTTTAAGCAAGCCAGGAT | RTT*3,6,9 (CCTGGT-to-CCTGGC PAM |
| | A (SEQ ID NO: 2737) | silencing edit) |
| 2738 | TTTTAAATACTCACATTTTTAAGCAATCCAGGAT | RTT*4,7,10 (CCTGGT-to-CCTGGA PAM |
| | A (SEQ ID NO: 2738) | silencing edit) |
| 2739 | ATTTTAAATACTCACATTTTTAAGCAAACCAGGA | RTT*1 |
| | TA (SEQ ID NO: 2739) | |
| 2740 | ATTTTAAATACTCACATTTTTAAGCAACCCAGGA | RTT*2,5,8 (CCTGGT-to-CCTGGG PAM |
| | TA (SEQ ID NO: 2740) | silencing edit) |
| 2741 | ATTTTAAATACTCACATTTTTAAGCAAGCCAGGA | RTT*3,6,9 (CCTGGT-to-CCTGGC PAM |
| | TA (SEQ ID NO: 2741) | silencing edit) |
| 2742 | ATTTTAAATACTCACATTTTTAAGCAATCCAGGA | RTT*4,7,10 (CCTGGT-to-CCTGGA PAM |
| | TA (SEQ ID NO: 2742) | silencing edit) |
| 2743 | AATTTTAAATACTCACATTTTTAAGCAAACCAGG | RTT*1 |
| | ATA (SEQ ID NO: 2743) | |
| 2744 | AATTTTAAATACTCACATTTTTAAGCAACCCAGG | RTT*2,5,8 (CCTGGT-to-CCTGGG PAM |
| | ATA (SEQ ID NO: 2744) | silencing edit) |
| 2745 | AATTTTAAATACTCACATTTTTAAGCAAGCCAGG | RTT*3,6,9 (CCTGGT-to-CCTGGC PAM |
| | ATA (SEQ ID NO: 2745) | silencing edit) |
| 2746 | AATTTTAAATACTCACATTTTTAAGCAATCCAGG | RTT*4,7,10 (CCTGGT-to-CCTGGA PAM |
| | ATA (SEQ ID NO: 2746) | silencing edit) |
| 2747 | AAATTTTAAATACTCACATTTTTAAGCAAACCAG | RTT*1 |
| | GATA (SEQ ID NO: 2747) | |
| 2748 | AAATTTTAAATACTCACATTTTTAAGCAACCCAG | RTT*2,5,8 (CCTGGT-to-CCTGGG PAM |
| | GATA (SEQ ID NO: 2748) | silencing edit) |
| 2749 | AAATTTTAAATACTCACATTTTTAAGCAAGCCAG | RTT*3,6,9 (CCTGGT-to-CCTGGC PAM |
| | GATA (SEQ ID NO: 2749) | silencing edit) |
| 2750 | AAATTTTAAATACTCACATTTTTAAGCAATCCAG | RTT*4,7,10 (CCTGGT-to-CCTGGA PAM |
| | GATA (SEQ ID NO: 2750) | silencing edit) |
| 2751 | TAAATTTTAAATACTCACATTTTTAAGCAAACCA | RTT*1 |
| | GGATA (SEQ ID NO: 2751) | |
| 2752 | TAAATTTTAAATACTCACATTTTTAAGCAACCCA | RTT*2,5,8 (CCTGGT-to-CCTGGG PAM |
| | GGATA (SEQ ID NO: 2752) | silencing edit) |
| 2753 | TAAATTTTAAATACTCACATTTTTAAGCAAGCCA | RTT*3,6,9 (CCTGGT-to-CCTGGC PAM |
| | GGATA (SEQ ID NO: 2753) | silencing edit) |
| 2754 | TAAATTTTAAATACTCACATTTTTAAGCAATCCA | RTT*4,7,10 (CCTGGT-to-CCTGGA PAM |
| | GGATA (SEQ ID NO: 2754) | silencing edit) |
| 2755 | ATAAATTTTAAATACTCACATTTTTAAGCAAACC | RTT*1 |
| | AGGATA (SEQ ID NO: 2755) | |
| 2756 | ATAAATTTTAAATACTCACATTTTTAAGCAACCC | RTT*2,5,8 (CCTGGT-to-CCTGGG PAM |
| | AGGATA (SEQ ID NO: 2756) | silencing edit) |
| 2757 | ATAAATTTTAAATACTCACATTTTTAAGCAAGCC | RTT*3,6,9 (CCTGGT-to-CCTGGC PAM |
| | AGGATA (SEQ ID NO: 2757) | silencing edit) |
| 2758 | ATAAATTTTAAATACTCACATTTTTAAGCAATCC | RTT*4,7,10 (CCTGGT-to-CCTGGA PAM |
| | AGGATA (SEQ ID NO: 2758) | silencing edit) |
| 2559 | AAACATCTCTTCTGGAGGAC (SEQ ID NO: 2559) | PE3 ngRNA spacer (TGAAAT PAM) |
| 2560 | ACTCACATTTTTAAGCAAAC (SEQ ID NO: 2560) | PE3b*1 ngRNA spacer (CAGGAT PAM) |
| 2759 | ACTCACATTTTTAAGCAACC (SEQ ID NO: 2759) | PE3b*2 ngRNA spacer (CAGGAT PAM) |
| 2760 | ACTCACATTTTTAAGCAAGC (SEQ ID NO: 2760) | PE3b*3 ngRNA spacer (CAGGAT PAM) |
| 2761 | ACTCACATTTTTAAGCAATC (SEQ ID NO: 2761) | PE3b*4 ngRNA spacer (CAGGAT PAM) |
| 2561 | ATTTTTAAGCAAACCAGGAT (SEQ ID NO: 2561) | PE3 ngRNA spacer (AGTAAT PAM) |
| 2762 | ATTTTTAAGCAACCCAGGAT (SEQ ID NO: 2762) | PE3b*5 ngRNA spacer (AGTAAT PAM) |
| 2763 | ATTTTTAAGCAAGCCAGGAT (SEQ ID NO: 2763) | PE3b*6 ngRNA spacer (AGTAAT PAM) |
| 2764 | ATTTTTAAGCAATCCAGGAT (SEQ ID NO: 2764) | PE3b*7 ngRNA spacer (AGTAAT PAM) |
| 2562 | CACATTTTTAAGCAAACCAG (SEQ ID NO: 2562) | PE3 ngRNA spacer (GATAGT PAM) |
| 2765 | CACATTTTTAAGCAACCCAG (SEQ ID NO: 2765) | PE3b*8 ngRNA spacer (GATAGT PAM) |
| 2766 | CACATTTTTAAGCAAGCCAG (SEQ ID NO: 2766) | PE3b*9 ngRNA spacer (GATAGT PAM) |
| 2767 | CACATTTTTAAGCAATCCAG (SEQ ID NO: 2767) | PE3b*10 ngRNA spacer (GATAGT PAM) |
| 2563 | CATTAAACATTTCAAAAGTG (SEQ ID NO: 2563) | PE3 ngRNA spacer (ATAAAT PAM) |
| 2564 | CATTCAGCATTAAACATTTC (SEQ ID NO: 2564) | PE3 ngRNA spacer (AAAAGT PAM) |
| 2565 | CATTTCAAAAGTGATAAATT (SEQ ID NO: 2565) | PE3 ngRNA spacer (TTAAAT PAM) |
| 2568 | TATTTCCATTTACTCTTTTT (SEQ ID NO: 2568) | PE3 ngRNA spacer (GCTGAT PAM) |
| 2569 | TCAGCATTAAACATTTCAAA (SEQ ID NO: 2569) | PE3 ngRNA spacer (AGTGAT PAM) |

TABLE 39

| Sequence | | |
|---|---|---|
| Number | Sequence | Description |
| 2768 | ACTATCCTGGTTTGCTT (SEQ ID NO: 2768) | PEgRNA spacer (AAAAAT PAM) |
| 2769 | TACTATCCTGGTTTGCTT (SEQ ID NO: 2769) | PEgRNA spacer (AAAAAT PAM) |
| 2770 | TTACTATCCTGGTTTGCTT (SEQ ID NO: 2770) | PEgRNA spacer (AAAAAT PAM) |
| 2771 | ATTACTATCCTGGTTTGCTT (SEQ ID NO: 2771) | PEgRNA spacer (AAAAAT PAM) |
| 2772 | GATTACTATCCTGGTTTGCTT (SEQ ID NO: 2772) | PEgRNA spacer (AAAAAT PAM) |
| 2773 | AGATTACTATCCTGGTTTGCTT (SEQ ID NO: 2773) | PEgRNA spacer (AAAAAT PAM) |
| 2774 | CAAAC | PBS |
| 2775 | CAAACC | PBS |
| 2776 | CAAACCA | PBS |
| 2777 | CAAACCAG | PBS |
| 2778 | CAAACCAGG | PBS |
| 2779 | CAAACCAGGA (SEQ ID NO: 2779) | PBS |
| 2780 | CAAACCAGGAT (SEQ ID NO: 2780) | PBS |
| 2781 | CAAACCAGGATA (SEQ ID NO: 2781) | PBS |
| 2782 | CAAACCAGGATAG (SEQ ID NO: 2782) | PBS |
| 2783 | CAAACCAGGATAGT (SEQ ID NO: 2783) | PBS |
| 2784 | CAAACCAGGATAGTA (SEQ ID NO: 2784) | PBS |
| 2785 | CAAACCAGGATAGTAA (SEQ ID NO: 2785) | PBS |
| 2786 | CAAACCAGGATAGTAAT (SEQ ID NO: 2786) | PBS |
| 2787 | CAAACCAGGATAGTAATC (SEQ ID NO: 2787) | PBS |
| 2788 | CAAACCAGGATAGTAATCT (SEQ ID NO: 2788) | PBS |
| 2789 | TCACATTTTTAAG (SEQ ID NO: 2789) | RTT |
| 2790 | TCACGTTTTTAAG (SEQ ID NO: 2790) | RTT (AAAAAT-to-AAAAAC PAM silencing |
| | | edit) |
| 2791 | CTCACATTTTTAAG (SEQ ID NO: 2791) | RTT |
| 2792 | CTCACGTTTTTAAG (SEQ ID NO: 2792) | RTT (AAAAAT-to-AAAAAC PAM silencing |
| | | edit) |
| 2793 | ACTCACATTTTTAAG (SEQ ID NO: 2793) | RTT |
| 2794 | ACTCACGTTTTTAAG (SEQ ID NO: 2794) | RTT (AAAAAT-to-AAAAAC PAM silencing |
| | | edit) |
| 2795 | TACTCACATTTTTAAG (SEQ ID NO: 2795) | RTT |
| 2796 | TACTCACGTTTTTAAG (SEQ ID NO: 2796) | RTT (AAAAAT-to-AAAAAC PAM silencing |
| | | edit) |
| 2797 | ATACTCACATTTTTAAG (SEQ ID NO: 2797) | RTT |
| 2798 | ATACTCACGTTTTTAAG (SEQ ID NO: 2798) | RTT (AAAAAT-to-AAAAAC PAM silencing |
| | | edit) |
| 2799 | AATACTCACATTTTTAAG (SEQ ID NO: 2799) | RTT |
| 2800 | AATACTCACGTTTTTAAG (SEQ ID NO: 2800) | RTT (AAAAAT-to-AAAAAC PAM silencing |
| | | edit) |
| 2801 | AAATACTCACATTTTTAAG (SEQ ID NO: 2801) | RTT |
| 2802 | AAATACTCACGTTTTTAAG (SEQ ID NO: 2802) | RTT (AAAAAT-to-AAAAAC PAM silencing |
| | | edit) |
| 2803 | TAAATACTCACATTTTTAAG (SEQ ID NO: 2803) | RTT |
| 2804 | TAAATACTCACGTTTTTAAG (SEQ ID NO: 2804) | RTT (AAAAAT-to-AAAAAC PAM silencing |
| | | edit) |
| 2805 | TTAAATACTCACATTTTTAAG (SEQ ID NO: 2805) | RTT |
| 2806 | TTAAATACTCACGTTTTTAAG (SEQ ID NO: 2806) | RTT (AAAAAT-to-AAAAAC PAM silencing |
| | | edit) |
| 2807 | TTTAAATACTCACATTTTTAAG (SEQ ID NO: 2807) | RTT |
| 2808 | TTTAAATACTCACGTTTTTAAG (SEQ ID NO: 2808) | RTT (AAAAAT-to-AAAAAC PAM silencing |
| | | edit) |
| 2809 | TTTTAAATACTCACATTTTTAAG (SEQ ID NO: | RTT |
| | 2809) | |
| 2810 | TTTTAAATACTCACGTTTTTAAG (SEQ ID NO: | RTT (AAAAAT-to-AAAAAC PAM silencing |
| | 2810) | edit) |
| 2811 | ATTTTAAATACTCACATTTTTAAG (SEQ ID NO: | RTT |
| | 2811) | |
| 2812 | ATTTTAAATACTCACGTTTTTAAG (SEQ ID NO: | RTT (AAAAAT-to-AAAAAC PAM silencing |
| | 2812) | edit) |
| 2813 | AATTTTAAATACTCACATTTTTAAG (SEQ ID NO: | RTT |
| | 2813) | |
| 2814 | AATTTTAAATACTCACGTTTTTAAG (SEQ ID NO: | RTT (AAAAAT-to-AAAAAC PAM silencing |
| | 2814) | edit) |
| 2815 | AAATTTTAAATACTCACATTTTTAAG (SEQ ID NO: | RTT |
| | 2815) | |
| 2816 | AAATTTTAAATACTCACGTTTTTAAG (SEQ ID NO: | RTT (AAAAAT-to-AAAAAC PAM silencing |
| | 2816) | edit) |
| 2817 | TAAATTTTAAATACTCACATTTTTAAG (SEQ ID | RTT |
| | NO: 2817) | |
| 2818 | TAAATTTTAAATACTCACGTTTTTAAG (SEQ ID | RTT (AAAAAT-to-AAAAAC PAM silencing |
| | NO: 2818) | edit) |
| 2819 | ATAAATTTTAAATACTCACATTTTTAAG (SEQ ID | RTT |
| | NO: 2819) | |
| 2820 | ATAAATTTTAAATACTCACGTTTTTAAG (SEQ ID | RTT (AAAAAT-to-AAAAAC PAM silencing |
| | NO: 2820) | edit) |
| 2821 | GATAAATTTTAAATACTCACATTTTTAAG (SEQ ID | RTT |
| | NO: 2821) | |
| 2822 | GATAAATTTTAAATACTCACGTTTTTAAG (SEQ ID | RTT (AAAAAT-to-AAAAAC PAM silencing |
| | NO: 2822) | edit) |
| 2823 | TGATAAATTTTAAATACTCACATTTTTAAG (SEQ | RTT |
| | ID NO: 2823) | |
| 2824 | TGATAAATTTTAAATACTCACGTTTTTAAG (SEQ | RTT (AAAAAT-to-AAAAAC PAM silencing |
| | ID NO: 2824) | edit) |
| 2825 | GTGATAAATTTTAAATACTCACATTTTTAAG (SEQ | RTT |
| | ID NO: 2825) | |
| 2826 | GTGATAAATTTTAAATACTCACGTTTTTAAG (SEQ | RTT (AAAAAT-to-AAAAAC PAM silencing |
| | ID NO: 2826) | edit) |
| 2827 | AGTGATAAATTTTAAATACTCACATTTTTAAG | RTT |
| | (SEQ ID NO: 2827) | |
| 2828 | AGTGATAAATTTTAAATACTCACGTTTTTAAG | RTT (AAAAAT-to-AAAAAC PAM silencing |
| | (SEQ ID NO: 2828) | edit) |
| 2829 | AAGTGATAAATTTTAAATACTCACATTTTTAAG | RTT |
| | (SEQ ID NO: 2829) | |
| 2830 | AAGTGATAAATTTTAAATACTCACGTTTTTAAG | RTT (AAAAAT-to-AAAAAC PAM silencing |
| | (SEQ ID NO: 2830) | edit) |
| 2831 | AAAGTGATAAATTTTAAATACTCACATTTTTAAG | RTT |
| | (SEQ ID NO: 2831) | |
| 2832 | AAAGTGATAAATTTTAAATACTCACGTTTTTAAG | RTT (AAAAAT-to-AAAAAC PAM silencing |
| | (SEQ ID NO: 2832) | edit) |
| 2833 | AAAAGTGATAAATTTTAAATACTCACATTTTTAA | RTT |
| | G (SEQ ID NO: 2833) | |
| 2834 | AAAAGTGATAAATTTTAAATACTCACGTTTTTAA | RTT (AAAAAT-to-AAAAAC PAM silencing |
| | G (SEQ ID NO: 2834) | edit) |
| 2835 | CAAAAGTGATAAATTTTAAATACTCACATTTTTA | RTT |
| | AG (SEQ ID NO: 2835) | |
| 2836 | CAAAAGTGATAAATTTTAAATACTCACGTTTTTA | RTT (AAAAAT-to-AAAAAC PAM silencing |
| | AG (SEQ ID NO: 2836) | edit) |
| 2837 | TCAAAAGTGATAAATTTTAAATACTCACATTTTT | RTT |
| | AAG (SEQ ID NO: 2837) | |
| 2838 | TCAAAAGTGATAAATTTTAAATACTCACGTTTTT | RTT (AAAAAT-to-AAAAAC PAM silencing |
| | AAG (SEQ ID NO: 2838) | edit) |
| 2839 | TTCAAAAGTGATAAATTTTAAATACTCACATTTT | RTT |
| | TAAG (SEQ ID NO: 2839) | |
| 2840 | TTCAAAAGTGATAAATTTTAAATACTCACGTTTT | RTT (AAAAAT-to-AAAAAC PAM silencing |
| | TAAG (SEQ ID NO: 2840) | edit) |
| 2841 | TTTCAAAAGTGATAAATTTTAAATACTCACATTT | RTT |
| | TTAAG (SEQ ID NO: 2841) | |
| 2842 | TTTCAAAAGTGATAAATTTTAAATACTCACGTTT | RTT (AAAAAT-to-AAAAAC PAM silencing |
| | TTAAG (SEQ ID NO: 2842) | edit) |
| 2843 | ATTTCAAAAGTGATAAATTTTAAATACTCACATT | RTT |
| | TTTAAG (SEQ ID NO: 2843) | |
| 2844 | ATTTCAAAAGTGATAAATTTTAAATACTCACGTT | RTT (AAAAAT-to-AAAAAC PAM silencing |
| | TTTAAG (SEQ ID NO: 2844) | edit) |
| 2559 | AAACATCTCTTCTGGAGGAC (SEQ ID NO: 2559) | PE3 ngRNA spacer (TGAAAT PAM) |
| 2563 | CATTAAACATTTCAAAAGTG (SEQ ID NO: 2563) | PE3 ngRNA spacer (ATAAAT PAM) |
| 2564 | CATTCAGCATTAAACATTTC (SEQ ID NO: 2564) | PE3 ngRNA spacer (AAAAGT PAM) |
| 2565 | CATTTCAAAAGTGATAAATT (SEQ ID NO: 2565) | PE3 ngRNA spacer (TTAAAT PAM) |
| 2845 | GTAAGAAGAGATAAACAAAG (SEQ ID NO: 2845) | PE3 ngRNA spacer (AAAAGT PAM) |
| 2568 | TATTTCCATTTACTCTTTTT (SEQ ID NO: 2568) | PE3 ngRNA spacer (GCTGAT PAM) |
| 2569 | TCAGCATTAAACATTTCAAA (SEQ ID NO: 2569) | PE3 ngRNA spacer (AGTGAT PAM) |

TABLE 40

| Sequence | | |
|---|---|---|
| Number | Sequence | Description |
| 2846 | CTATAGATTACTATCCT (SEQ ID NO: 2846) | PEgRNA spacer (GG PAM) |
| 2847 | CCTATAGATTACTATCCT (SEQ ID NO: 2847) | PERNA spacer (GG PAM) |
| 2848 | ACCTATAGATTACTATCCT (SEQ ID NO: 2848) | PEgRNA spacer (GG PAM) |
| 2613 | CACCTATAGATTACTATCCT (SEQ ID NO: 2613) | PEgRNA spacer (GG PAM) |
| 2849 | GCACCTATAGATTACTATCCT (SEQ ID NO: 2849) | PEgRNA spacer (GG PAM) |
| 2850 | TGCACCTATAGATTACTATCCT (SEQ ID NO: 2850) | PERNA spacer (GG PAM) |
| 2851 | ATAGT | PBS |
| 2852 | ATAGTA | PBS |
| 2853 | ATAGTAA | PBS |
| 2854 | ATAGTAAT | PBS |
| 2855 | ATAGTAATC | PBS |
| 2856 | ATAGTAATCT (SEQ ID NO: 2856) | PBS |
| 2857 | ATAGTAATCTA (SEQ ID NO: 2857) | PBS |
| 2858 | ATAGTAATCTAT (SEQ ID NO: 2858) | PBS |
| 2859 | ATAGTAATCTATA (SEQ ID NO: 2859) | PBS |
| 2860 | ATAGTAATCTATAG (SEQ ID NO: 2860) | PBS |
| 2861 | ATAGTAATCTATAGG (SEQ ID NO: 2861) | PBS |
| 2862 | ATAGTAATCTATAGGT (SEQ ID NO: 2862) | PBS |
| 2863 | ATAGTAATCTATAGGTG (SEQ ID NO: 2863) | PBS |
| 2864 | ATAGTAATCTATAGGTGC (SEQ ID NO: 2864) | PBS |
| 2865 | ATAGTAATCTATAGGTGCA (SEQ ID NO: 2865) | PBS |
| 2866 | TCACATTTTTAAGCAAACCAGG (SEQ ID NO: 2866) | RTT |
| 2867 | CTCACATTTTTAAGCAAACCAGG (SEQ ID NO: | RTT |
| | 2867) | |
| 2868 | ACTCACATTTTTAAGCAAACCAGG (SEQ ID NO: | RTT |
| | 2868) | |
| 2869 | TACTCACATTTTTAAGCAAACCAGG (SEQ ID NO: | RTT |
| | 2869) | |
| 2870 | ATACTCACATTTTTAAGCAAACCAGG (SEQ ID | RTT |
| | NO: 2870) | |
| 2871 | AATACTCACATTTTTAAGCAAACCAGG (SEQ ID | RTT |
| | NO: 2871) | |
| 2872 | AAATACTCACATTTTTAAGCAAACCAGG (SEQ ID | RTT |
| | NO: 2872) | |
| 2873 | TAAATACTCACATTTTTAAGCAAACCAGG (SEQ | RTT |
| | ID NO: 2873) | |
| 2874 | TTAAATACTCACATTTTTAAGCAAACCAGG (SEQ | RTT |
| | ID NO: 2874) | |
| 2875 | TTTAAATACTCACATTTTTAAGCAAACCAGG | RTT |
| | (SEQ ID NO: 2875) | |
| 2876 | TTTTAAATACTCACATTTTTAAGCAAACCAGG | RTT |
| | (SEQ ID NO: 2876) | |
| 2877 | ATTTTAAATACTCACATTTTTAAGCAAACCAGG | RTT |
| | (SEQ ID NO: 2877) | |
| 2878 | AATTTTAAATACTCACATTTTTAAGCAAACCAGG | RTT |
| | (SEQ ID NO: 2878) | |
| 2879 | AAATTTTAAATACTCACATTTTTAAGCAAACCAG | RTT |
| | G (SEQ ID NO: 2879) | |
| 2880 | TAAATTTTAAATACTCACATTTTTAAGCAAACCA | RTT |
| | GG (SEQ ID NO: 2880) | |
| 2881 | ATAAATTTTAAATACTCACATTTTTAAGCAAACC | RTT |
| | AGG (SEQ ID NO: 2881) | |
| 2882 | GATAAATTTTAAATACTCACATTTTTAAGCAAAC | RTT |
| | CAGG (SEQ ID NO: 2882) | |
| 2883 | TGATAAATTTTAAATACTCACATTTTTAAGCAAA | RTT |
| | CCAGG (SEQ ID NO: 2883) | |
| 2884 | GTGATAAATTTTAAATACTCACATTTTTAAGCAA | RTT |
| | ACCAGG (SEQ ID NO: 2884) | |
| 2885 | AAAAGTTAAACATCTCTTCT (SEQ ID NO: 2885) | PE3 ngRNA spacer (GG PAM) |
| 2559 | AAACATCTCTTCTGGAGGAC (SEQ ID NO: 2559) | PE3 ngRNA spacer (TG PAM) |
| 2886 | AAGTTAAACATCTCTTCTGG (SEQ ID NO: 2886) | PE3 ngRNA spacer (AG PAM) |
| 2573 | AGCATTAAACATTTCAAAAG (SEQ ID NO: 2573) | PE3 ngRNA spacer (TG PAM) |
| 2887 | AGTTAAACATCTCTTCTGGA (SEQ ID NO: 2887) | PE3 ngRNA spacer (GG PAM) |
| 2888 | ATATTTCCATTTACTCTTTT (SEQ ID NO: 2888) | PE3 ngRNA spacer (TG PAM) |
| 2561 | ATTTTTAAGCAAACCAGGAT (SEQ ID NO: 2561) | PE3 ngRNA spacer (AG PAM) |
| 2889 | CATTTACTCTTTTTGCTGAT (SEQ ID NO: 2889) | PE3 ngRNA spacer (GG PAM) |
| 2890 | CCATTTACTCTTTTTGCTGA (SEQ ID NO: 2890) | PE3 ngRNA spacer (TG PAM) |
| 2891 | CTCACATTTTTAAGCAAACC (SEQ ID NO: 2891) | PE3b ngRNA spacer (AG PAM) |
| 2892 | GAAAAGTTAAACATCTCTTC (SEQ ID NO: 2892) | PE3 ngRNA spacer (TG PAM) |
| 2893 | TCACATTTTTAAGCAAACCA (SEQ ID NO: 2893) | PE3b ngRNA spacer (GG PAM) |
| 2569 | TCAGCATTAAACATTTCAAA (SEQ ID NO: 2569) | PE3 ngRNA spacer (AG PAM) |
| 2894 | TTTAAATACTCACATTTTTA (SEQ ID NO: 2894) | PE3b ngRNA spacer (AG PAM) |
| 2895 | TTTCCATTTACTCTTTTTGC (SEQ ID NO: 2895) | PE3 ngRNA spacer (TG PAM) |
| 2896 | TTTTTGCTGATGGCACATTC (SEQ ID NO: 2896) | PE3 ngRNA spacer (AG PAM) |
| 2897 | AAGTTAAACATCTCTTCTGGGTTTTAGAGCTAGA | PE3 ngRNA (AG PAM) |
| | AATAGCAAGTTAAAATAAGGCTAGTCCGTTATCA | |
| | ACTTGAAAAAGTGGCACCGAGTCGGTGC (SEQ ID | |
| | NO: 2897) | |
| 2898 | GAAAAGTTAAACATCTCTTCGTTTTAGAGCTAGA | PE3 ngRNA (TG PAM) |
| | AATAGCAAGTTAAAATAAGGCTAGTCCGTTATCA | |
| | ACTTGAAAAAGTGGCACCGAGTCGGTGC (SEQ ID | |
| | NO: 2898) | |
| 2899 | AAGTTAAACATCTCTTCTGGGTTTTAGAGCTAGA | PE3 ngRNA (AG PAM), contains end |
| | AATAGCAAGTTAAAATAAGGCTAGTCCGTTATCA | adaptations |
| | ACTTGAAAAAGTGGCACCGAGTCGGTGCTTTT | |
| | (SEQ ID NO: 2899) | |
| 2900 | GAAAAGTTAAACATCTCTTCGTTTTAGAGCTAGA | PE3 ngRNA (TG PAM), contains end |
| | AATAGCAAGTTAAAATAAGGCTAGTCCGTTATCA | adaptations |
| | ACTTGAAAAAGTGGCACCGAGTCGGTGCTTTT | |
| | (SEQ ID NO: 2900) | |

TABLE 41

| Sequence | | |
|---|---|---|
| Number | Sequence | Description |
| 2901 | TAAACATTTCAAAAGTG (SEQ ID NO: 2901) | PEgRNA spacer (ATAAAT PAM) |
| 2902 | TTAAACATTTCAAAAGTG (SEQ ID NO: 2902) | PEgRNA spacer (ATAAAT PAM) |
| 2903 | ATTAAACATTTCAAAAGTG (SEQ ID NO: 2903) | PEgRNA spacer (ATAAAT PAM) |
| 2563 | CATTAAACATTTCAAAAGTG (SEQ ID NO: 2563) | PERNA spacer (ATAAAT PAM) |
| 2904 | GCATTAAACATTTCAAAAGTG (SEQ ID NO: 2904) | PEgRNA spacer (ATAAAT PAM) |
| 2905 | AGCATTAAACATTTCAAAAGTG (SEQ ID NO: | PEgRNA spacer (ATAAAT PAM) |
| | 2905) | |
| 2906 | TTTTG | PBS |
| 2907 | TTTTGA | PBS |
| 2908 | TTTTGAA | PBS |
| 2909 | TTTTGAAA | PBS |
| 2910 | TTTTGAAAT | PBS |
| 2911 | TTTTGAAATG (SEQ ID NO: 2911) | PBS |
| 2912 | TTTTGAAATGT (SEQ ID NO: 2912) | PBS |
| 2913 | TTTTGAAATGTT (SEQ ID NO: 2913) | PBS |
| 2914 | TTTTGAAATGTTT (SEQ ID NO: 2914) | PBS |
| 2915 | TTTTGAAATGTTTA (SEQ ID NO: 2915) | PBS |
| 2916 | TTTTGAAATGTTTAA (SEQ ID NO: 2916) | PBS |
| 2917 | TTTTGAAATGTTTAAT (SEQ ID NO: 2917) | PBS |
| 2918 | TTTTGAAATGTTTAATG (SEQ ID NO: 2918) | PBS |
| 2919 | TTTTGAAATGTTTAATGC (SEQ ID NO: 2919) | PBS |
| 2920 | TTTTGAAATGTTTAATGCT (SEQ ID NO: 2920) | PBS |
| 2921 | AGTATTTAAAATTTATCAC (SEQ ID NO: 2921) | RTT |
| 2922 | GAGTATTTAAAATTTATCAC (SEQ ID NO: 2922) | RTT |
| 2923 | TGAGTATTTAAAATTTATCAC (SEQ ID NO: 2923) | RTT |
| 2924 | GTGAGTATTTAAAATTTATCAC (SEQ ID NO: 2924) | RTT |
| 2925 | TGTGAGTATTTAAAATTTATCAC (SEQ ID NO: | RTT |
| | 2925) | |
| 2926 | ATGTGAGTATTTAAAATTTATCAC (SEQ ID NO: | RTT |
| | 2926) | |
| 2927 | AATGTGAGTATTTAAAATTTATCAC (SEQ ID NO: | RTT |
| | 2927) | |
| 2928 | AAATGTGAGTATTTAAAATTTATCAC (SEQ ID | RTT |
| | NO: 2928) | |
| 2929 | AAAATGTGAGTATTTAAAATTTATCAC (SEQ ID | RTT |
| | NO: 2929) | |
| 2930 | AAAAATGTGAGTATTTAAAATTTATCAC (SEQ ID | RTT |
| | NO: 2930) | |
| 2931 | TAAAAATGTGAGTATTTAAAATTTATCAC (SEQ | RTT |
| | ID NO: 2931) | |
| 2932 | TTAAAAATGTGAGTATTTAAAATTTATCAC (SEQ | RTT |
| | ID NO: 2932) | |
| 2933 | CTTAAAAATGTGAGTATTTAAAATTTATCAC | RTT |
| | (SEQ ID NO: 2933) | |
| 2934 | GCTTAAAAATGTGAGTATTTAAAATTTATCAC | RTT |
| | (SEQ ID NO: 2934) | |
| 2935 | TGCTTAAAAATGTGAGTATTTAAAATTTATCAC | RTT |
| | (SEQ ID NO: 2935) | |
| 2936 | TTGCTTAAAAATGTGAGTATTTAAAATTTATCAC | RTT |
| | (SEQ ID NO: 2936) | |
| 2937 | TTTGCTTAAAAATGTGAGTATTTAAAATTTATCA | RTT |
| | C (SEQ ID NO: 2937) | |
| 2938 | GTTTGCTTAAAAATGTGAGTATTTAAAATTTATC | RTT |
| | AC (SEQ ID NO: 2938) | |
| 2939 | GGTTTGCTTAAAAATGTGAGTATTTAAAATTTAT | RTT |
| | CAC (SEQ ID NO: 2939) | |
| 2940 | TGGTTTGCTTAAAAATGTGAGTATTTAAAATTTA | RTT |
| | TCAC (SEQ ID NO: 2940) | |
| 2941 | CTGGTTTGCTTAAAAATGTGAGTATTTAAAATTT | RTT |
| | ATCAC (SEQ ID NO: 2941) | |
| 2942 | CCTGGTTTGCTTAAAAATGTGAGTATTTAAAATT | RTT |
| | TATCAC (SEQ ID NO: 2942) | |
| 2943 | AAGAAGTTGCTCTTTTCACT (SEQ ID NO: 2943) | PE3 ngRNA spacer (CAAGGT PAM) |
| 2533 | AAGGTCTTGGGTATGCACCT (SEQ ID NO: 2533) | PE3 ngRNA spacer (ATAGAT PAM) |
| 2944 | ATATACTTTCAGCACTCAGA (SEQ ID NO: 2944) | PE3 ngRNA spacer (TTTGAT PAM) |
| 2945 | ATCTCATATACTTTCAGCAC (SEQ ID NO: 2945) | PE3 ngRNA spacer (TCAGAT PAM) |
| 2677 | ATGCACCTATAGATTACTAT (SEQ ID NO: 2677) | PE3 ngRNA spacer (CCTGGT PAM) |
| 2771 | ATTACTATCCTGGTTTGCTT (SEQ ID NO: 2771) | PE3 ngRNA spacer (AAAAAT PAM) |
| 2626 | TATTTAAAATTTATCACTTT (SEQ ID NO: 2626) | PE3 ngRNA spacer (TGAAAT PAM) |
| 2627 | TCAGCACTCAGATTTGATAA (SEQ ID NO: 2627) | PE3 ngRNA spacer (AGAAGT PAM) |
| 2946 | TGCTCTTTTCACTCAAGGTC (SEQ ID NO: 2946) | PE3 ngRNA spacer (TTGGGT PAM) |
| 2947 | TGCTTAAAAATGTGAGTATT (SEQ ID NO: 2947) | PE3b ngRNA spacer (TAAAAT PAM) |

TABLE 42

| Sequence | | |
|---|---|---|
| Number | Sequence | Description |
| 2948 | TCAGCATTAAACATTTC (SEQ ID NO: 2948) | PEgRNA spacer (AAAAGT PAM) |
| 2949 | TTCAGCATTAAACATTTC (SEQ ID NO: 2949) | PEgRNA spacer (AAAAGT PAM) |
| 2950 | ATTCAGCATTAAACATTTC (SEQ ID NO: 2950) | PEgRNA spacer (AAAAGT PAM) |
| 2564 | CATTCAGCATTAAACATTTC (SEQ ID NO: 2564) | PEgRNA spacer (AAAAGT PAM) |
| 2951 | ACATTCAGCATTAAACATTTC (SEQ ID NO: 2951) | PEgRNA spacer (AAAAGT PAM) |
| 2952 | CACATTCAGCATTAAACATTTC (SEQ ID NO: 2952) | PEgRNA spacer (AAAAGT PAM) |
| 2953 | ATGTT | PBS |
| 2954 | ATGTTT | PBS |
| 2955 | ATGTTTA | PBS |
| 2956 | ATGTTTAA | PBS |
| 2957 | ATGTTTAAT | PBS |
| 2958 | ATGTTTAATG (SEQ ID NO: 2958) | PBS |
| 2959 | ATGTTTAATGC (SEQ ID NO: 2959) | PBS |
| 2960 | ATGTTTAATGCT (SEQ ID NO: 2960) | PBS |
| 2961 | ATGTTTAATGCTG (SEQ ID NO: 2961) | PBS |
| 2962 | ATGTTTAATGCTGA (SEQ ID NO: 2962) | PBS |
| 2963 | ATGTTTAATGCTGAA (SEQ ID NO: 2963) | PBS |
| 2964 | ATGTTTAATGCTGAAT (SEQ ID NO: 2964) | PBS |
| 2965 | ATGTTTAATGCTGAATG (SEQ ID NO: 2965) | PBS |
| 2966 | ATGTTTAATGCTGAATGT (SEQ ID NO: 2966) | PBS |
| 2967 | ATGTTTAATGCTGAATGTG (SEQ ID NO: 2967) | PBS |
| 2968 | AGTATTTAAAATTTATCACTTTTGAA (SEQ ID NO: | RTT |
| | 2968) | |
| 2969 | GAGTATTTAAAATTTATCACTTTTGAA (SEQ ID | RTT |
| | NO: 2969) | |
| 2970 | TGAGTATTTAAAATTTATCACTTTTGAA (SEQ ID | RTT |
| | NO: 2970) | |
| 2971 | GTGAGTATTTAAAATTTATCACTTTTGAA (SEQ ID | RTT |
| | NO: 2971) | |
| 2972 | TGTGAGTATTTAAAATTTATCACTTTTGAA (SEQ | RTT |
| | ID NO: 2972) | |
| 2973 | ATGTGAGTATTTAAAATTTATCACTTTTGAA (SEQ | RTT |
| | ID NO: 2973) | |
| 2974 | AATGTGAGTATTTAAAATTTATCACTTTTGAA | RTT |
| | (SEQ ID NO: 2974) | |
| 2975 | AAATGTGAGTATTTAAAATTTATCACTTTTGAA | RTT |
| | (SEQ ID NO: 2975) | |
| 2976 | AAAATGTGAGTATTTAAAATTTATCACTTTTGAA | RTT |
| | (SEQ ID NO: 2976) | |
| 2977 | AAAAATGTGAGTATTTAAAATTTATCACTTTTGA | RTT |
| | A (SEQ ID NO: 2977) | |
| 2978 | TAAAAATGTGAGTATTTAAAATTTATCACTTTTG | RTT |
| | AA (SEQ ID NO: 2978) | |
| 2979 | TTAAAAATGTGAGTATTTAAAATTTATCACTTTT | RTT |
| | GAA (SEQ ID NO: 2979) | |
| 2980 | CTTAAAAATGTGAGTATTTAAAATTTATCACTTT | RTT |
| | TGAA (SEQ ID NO: 2980) | |
| 2981 | GCTTAAAAATGTGAGTATTTAAAATTTATCACTT | RTT |
| | TTGAA (SEQ ID NO: 2981) | |
| 2982 | TGCTTAAAAATGTGAGTATTTAAAATTTATCACT | RTT |
| | TTTGAA (SEQ ID NO: 2982) | |
| 2943 | AAGAAGTTGCTCTTTTCACT (SEQ ID NO: 2943) | PE3 ngRNA spacer (CAAGGT PAM) |
| 2533 | AAGGTCTTGGGTATGCACCT (SEQ ID NO: 2533) | PE3 ngRNA spacer (ATAGAT PAM) |
| 2983 | AATTTATCACTTTTGAAATG (SEQ ID NO: 2983) | PE3 ngRNA spacer (TTTAAT PAM) |
| 2944 | ATATACTTTCAGCACTCAGA (SEQ ID NO: 2944) | PE3 ngRNA spacer (TTTGAT PAM) |
| 2945 | ATCTCATATACTTTCAGCAC (SEQ ID NO: 2945) | PE3 ngRNA spacer (TCAGAT PAM) |
| 2677 | ATGCACCTATAGATTACTAT (SEQ ID NO: 2677) | PE3 ngRNA spacer (CCTGGT PAM) |
| 2771 | ATTACTATCCTGGTTTGCTT (SEQ ID NO: 2771) | PE3 ngRNA spacer (AAAAAT PAM) |
| 2626 | TATTTAAAATTTATCACTTT (SEQ ID NO: 2626) | PE3 ngRNA spacer (TGAAAT PAM) |
| 2627 | TCAGCACTCAGATTTGATAA (SEQ ID NO: 2627) | PE3 ngRNA spacer (AGAAGT PAM) |
| 2946 | TGCTCTTTTCACTCAAGGTC (SEQ ID NO: 2946) | PE3 ngRNA spacer (TTGGGT PAM) |
| 2947 | TGCTTAAAAATGTGAGTATT (SEQ ID NO: 2947) | PE3b ngRNA spacer (TAAAAT PAM) |

TABLE 43

| Sequence | | |
|---|---|---|
| Number | Sequence | Description |
| 2984 | TTCAAAAGTGATAAATT (SEQ ID NO: 2984) | PEgRNA spacer (TTAAAT PAM) |
| 2985 | TTTCAAAAGTGATAAATT (SEQ ID NO: 2985) | PEgRNA spacer (TTAAAT PAM) |
| 2986 | ATTTCAAAAGTGATAAATT (SEQ ID NO: 2986) | PEgRNA spacer (TTAAAT PAM) |
| 2565 | CATTTCAAAAGTGATAAATT (SEQ ID NO: 2565) | PEgRNA spacer (TTAAAT PAM) |
| 2987 | ACATTTCAAAAGTGATAAATT (SEQ ID NO: 2987) | PERNA spacer (TTAAAT PAM) |
| 2988 | AACATTTCAAAAGTGATAAATT (SEQ ID NO: | PEgRNA spacer (TTAAAT PAM) |
| | 2988) | |
| 2989 | TTATC | PBS |
| 2990 | TTATCA | PBS |
| 2991 | TTATCAC | PBS |
| 2992 | TTATCACT | PBS |
| 2993 | TTATCACTT | PBS |
| 2994 | TTATCACTTT (SEQ ID NO: 2994) | PBS |
| 2995 | TTATCACTTTT (SEQ ID NO: 2995) | PBS |
| 2996 | TTATCACTTTTG (SEQ ID NO: 2996) | PBS |
| 2997 | TTATCACTTTTGA (SEQ ID NO: 2997) | PBS |
| 2998 | TTATCACTTTTGAA (SEQ ID NO: 2998) | PBS |
| 2999 | TTATCACTTTTGAAA (SEQ ID NO: 2999) | PBS |
| 3000 | TTATCACTTTTGAAAT (SEQ ID NO: 3000) | PBS |
| 3001 | TTATCACTTTTGAAATG (SEQ ID NO: 3001) | PBS |
| 3002 | TTATCACTTTTGAAATGT (SEQ ID NO: 3002) | PBS |
| 3003 | TTATCACTTTTGAAATGTT (SEQ ID NO: 3003) | PBS |
| 3004 | AGTATTTAAAAT (SEQ ID NO: 3004) | RTT |
| 3005 | GAGTATTTAAAAT (SEQ ID NO: 3005) | RTT |
| 3006 | TGAGTATTTAAAAT (SEQ ID NO: 3006) | RTT |
| 3007 | GTGAGTATTTAAAAT (SEQ ID NO: 3007) | RTT |
| 3008 | TGTGAGTATTTAAAAT (SEQ ID NO: 3008) | RTT |
| 3009 | ATGTGAGTATTTAAAAT (SEQ ID NO: 3009) | RTT |
| 3010 | AATGTGAGTATTTAAAAT (SEQ ID NO: 3010) | RTT |
| 3011 | AAATGTGAGTATTTAAAAT (SEQ ID NO: 3011) | RTT |
| 3012 | AAAATGTGAGTATTTAAAAT (SEQ ID NO: 3012) | RTT |
| 3013 | AAAAATGTGAGTATTTAAAAT (SEQ ID NO: 3013) | RTT |
| 3014 | TAAAAATGTGAGTATTTAAAAT (SEQ ID NO: | RTT |
| | 3014) | |
| 3015 | TTAAAAATGTGAGTATTTAAAAT (SEQ ID NO: | RTT |
| | 3015) | |
| 3016 | CTTAAAAATGTGAGTATTTAAAAT (SEQ ID NO: | RTT |
| | 3016) | |
| 3017 | GCTTAAAAATGTGAGTATTTAAAAT (SEQ ID NO: | RTT |
| | 3017) | |
| 3018 | TGCTTAAAAATGTGAGTATTTAAAAT (SEQ ID | RTT |
| | NO: 3018) | |
| 3019 | TTGCTTAAAAATGTGAGTATTTAAAAT (SEQ ID | RTT |
| | NO: 3019) | |
| 3020 | TTTGCTTAAAAATGTGAGTATTTAAAAT (SEQ ID | RTT |
| | NO: 3020) | |
| 3021 | GTTTGCTTAAAAATGTGAGTATTTAAAAT (SEQ | RTT |
| | ID NO: 3021) | |
| 3022 | GGTTTGCTTAAAAATGTGAGTATTTAAAAT (SEQ | RTT |
| | ID NO: 3022) | |
| 3023 | TGGTTTGCTTAAAAATGTGAGTATTTAAAAT | RTT |
| | (SEQ ID NO: 3023) | |
| 3024 | CTGGTTTGCTTAAAAATGTGAGTATTTAAAAT | RTT |
| | (SEQ ID NO: 3024) | |
| 3025 | CCTGGTTTGCTTAAAAATGTGAGTATTTAAAAT | RTT |
| | (SEQ ID NO: 3025) | |
| 3026 | TCCTGGTTTGCTTAAAAATGTGAGTATTTAAAAT | RTT |
| | (SEQ ID NO: 3026) | |
| 3027 | ATCCTGGTTTGCTTAAAAATGTGAGTATTTAAAA | RTT |
| | T (SEQ ID NO: 3027) | |
| 3028 | TATCCTGGTTTGCTTAAAAATGTGAGTATTTAAA | RTT |
| | AT (SEQ ID NO: 3028) | |
| 3029 | CTATCCTGGTTTGCTTAAAAATGTGAGTATTTAA | RTT |
| | AAT (SEQ ID NO: 3029) | |
| 3030 | ACTATCCTGGTTTGCTTAAAAATGTGAGTATTTA | RTT |
| | AAAT (SEQ ID NO: 3030) | |
| 3031 | TACTATCCTGGTTTGCTTAAAAATGTGAGTATTT | RTT |
| | AAAAT (SEQ ID NO: 3031) | |
| 3032 | TTACTATCCTGGTTTGCTTAAAAATGTGAGTATTT | RTT |
| | AAAAT (SEQ ID NO: 3032) | |
| 2943 | AAGAAGTTGCTCTTTTCACT (SEQ ID NO: 2943) | PE3 ngRNA spacer (CAAGGT PAM) |
| 2533 | AAGGTCTTGGGTATGCACCT (SEQ ID NO: 2533) | PE3 ngRNA spacer (ATAGAT PAM) |
| 2944 | ATATACTTTCAGCACTCAGA (SEQ ID NO: 2944) | PE3 ngRNA spacer (TTTGAT PAM) |
| 2945 | ATCTCATATACTTTCAGCAC (SEQ ID NO: 2945) | PE3 ngRNA spacer (TCAGAT PAM) |
| 2677 | ATGCACCTATAGATTACTAT (SEQ ID NO: 2677) | PE3 ngRNA spacer (CCTGGT PAM) |
| 2771 | ATTACTATCCTGGTTTGCTT (SEQ ID NO: 2771) | PE3 ngRNA spacer (AAAAAT PAM) |
| 2627 | TCAGCACTCAGATTTGATAA (SEQ ID NO: 2627) | PE3 ngRNA spacer (AGAAGT PAM) |
| 2946 | TGCTCTTTTCACTCAAGGTC (SEQ ID NO: 2946) | PE3 ngRNA spacer (TTGGGT PAM) |
| 2947 | TGCTTAAAAATGTGAGTATT (SEQ ID NO: 2947) | PE3b ngRNA spacer (TAAAAT PAM) |

TABLE 44

| Sequence | | |
|---|---|---|
| Number | Sequence | Description |
| 3033 | GTTTGCTTAAAAATGTG (SEQ ID NO: 3033) | PERNA spacer (TG PAM) |
| 3034 | GGTTTGCTTAAAAATGTG (SEQ ID NO: 3034) | PEgRNA spacer (TG PAM) |
| 3035 | TGGTTTGCTTAAAAATGTG (SEQ ID NO: 3035) | PEgRNA spacer (TG PAM) |
| 2617 | CTGGTTTGCTTAAAAATGTG (SEQ ID NO: 2617) | PEgRNA spacer (TG PAM) |
| 3036 | CCTGGTTTGCTTAAAAATGTG (SEQ ID NO: 3036) | PEgRNA spacer (TG PAM) |
| 3037 | TCCTGGTTTGCTTAAAAATGTG (SEQ ID NO: 3037) | PEgRNA spacer (TG PAM) |
| 3038 | ATTTT | PBS |
| 3039 | ATTTTT | PBS |
| 3040 | ATTTTTA | PBS |
| 3041 | ATTTTTAA | PBS |
| 3042 | ATTTTTAAG | PBS |
| 3043 | ATTTTTAAGC (SEQ ID NO: 3043) | PBS |
| 3044 | ATTTTTAAGCA (SEQ ID NO: 3044) | PBS |
| 3045 | ATTTTTAAGCAA (SEQ ID NO: 3045) | PBS |
| 3046 | ATTTTTAAGCAAA (SEQ ID NO: 3046) | PBS |
| 3047 | ATTTTTAAGCAAAC (SEQ ID NO: 3047) | PBS |
| 3048 | ATTTTTAAGCAAACC (SEQ ID NO: 3048) | PBS |
| 3049 | ATTTTTAAGCAAACCA (SEQ ID NO: 3049) | PBS |
| 3050 | ATTTTTAAGCAAACCAG (SEQ ID NO: 3050) | PBS |
| 3051 | ATTTTTAAGCAAACCAGG (SEQ ID NO: 3051) | PBS |
| 3052 | ATTTTTAAGCAAACCAGGA (SEQ ID NO: 3052) | PBS |
| 3053 | AAATACTCAC (SEQ ID NO: 3053) | RTT |
| 3054 | TAAATACTCAC (SEQ ID NO: 3054) | RTT |
| 3055 | TTAAATACTCAC (SEQ ID NO: 3055) | RTT |
| 3056 | TTTAAATACTCAC (SEQ ID NO: 3056) | RTT |
| 3057 | TTTTAAATACTCAC (SEQ ID NO: 3057) | RTT |
| 3058 | ATTTTAAATACTCAC (SEQ ID NO: 3058) | RTT |
| 3059 | AATTTTAAATACTCAC (SEQ ID NO: 3059) | RTT |
| 3060 | AAATTTTAAATACTCAC (SEQ ID NO: 3060) | RTT |
| 3061 | TAAATTTTAAATACTCAC (SEQ ID NO: 3061) | RTT |
| 3062 | ATAAATTTTAAATACTCAC (SEQ ID NO: 3062) | RTT |
| 3063 | GATAAATTTTAAATACTCAC (SEQ ID NO: 3063) | RTT |
| 3064 | TGATAAATTTTAAATACTCAC (SEQ ID NO: 3064) | RTT |
| 3065 | GTGATAAATTTTAAATACTCAC (SEQ ID NO: 3065) | RTT |
| 3066 | AGTGATAAATTTTAAATACTCAC (SEQ ID NO: | RTT |
| | 3066) | |
| 3067 | AAGTGATAAATTTTAAATACTCAC (SEQ ID NO: | RTT |
| | 3067) | |
| 3068 | AAAGTGATAAATTTTAAATACTCAC (SEQ ID NO: | RTT |
| | 3068) | |
| 3069 | AAAAGTGATAAATTTTAAATACTCAC (SEQ ID | RTT |
| | NO: 3069) | |
| 3070 | CAAAAGTGATAAATTTTAAATACTCAC (SEQ ID | RTT |
| | NO: 3070) | |
| 3071 | TCAAAAGTGATAAATTTTAAATACTCAC (SEQ ID | RTT |
| | NO: 3071) | |
| 3072 | TTCAAAAGTGATAAATTTTAAATACTCAC (SEQ | RTT |
| | ID NO: 3072) | |
| 3073 | TTTCAAAAGTGATAAATTTTAAATACTCAC (SEQ | RTT |
| | ID NO: 3073) | |
| 3074 | ATTTCAAAAGTGATAAATTTTAAATACTCAC | RTT |
| | (SEQ ID NO: 3074) | |
| 3075 | CATTTCAAAAGTGATAAATTTTAAATACTCAC | RTT |
| | (SEQ ID NO: 3075) | |
| 3076 | ACATTTCAAAAGTGATAAATTTTAAATACTCAC | RTT |
| | (SEQ ID NO: 3076) | |
| 3077 | AACATTTCAAAAGTGATAAATTTTAAATACTCAC | RTT |
| | (SEQ ID NO: 3077) | |
| 3078 | AAACATTTCAAAAGTGATAAATTTTAAATACTCA | RTT |
| | C (SEQ ID NO: 3078) | |
| 3079 | TAAACATTTCAAAAGTGATAAATTTTAAATACTC | RTT |
| | AC (SEQ ID NO: 3079) | |
| 3080 | TTAAACATTTCAAAAGTGATAAATTTTAAATACT | RTT |
| | CAC (SEQ ID NO: 3080) | |
| 3081 | ATTAAACATTTCAAAAGTGATAAATTTTAAATAC | RTT |
| | TCAC (SEQ ID NO: 3081) | |
| 3082 | CATTAAACATTTCAAAAGTGATAAATTTTAAATA | RTT |
| | CTCAC (SEQ ID NO: 3082) | |
| 3083 | GCATTAAACATTTCAAAAGTGATAAATTTTAAAT | RTT |
| | ACTCAC (SEQ ID NO: 3083) | |
| 2885 | AAAAGTTAAACATCTCTTCT (SEQ ID NO: 2885) | PE3 ngRNA spacer (GG PAM) |
| 2559 | AAACATCTCTTCTGGAGGAC (SEQ ID NO: 2559) | PE3 ngRNA spacer (TG PAM) |
| 2886 | AAGTTAAACATCTCTTCTGG (SEQ ID NO: 2886) | PE3 ngRNA spacer (AG PAM) |
| 3084 | AGAAGAGATAAACAAAGAAA (SEQ ID NO: 3084) | PE3 ngRNA spacer (AG PAM) |
| 2573 | AGCATTAAACATTTCAAAAG (SEQ ID NO: 2573) | PE3 ngRNA spacer (TG PAM) |
| 3085 | AGGTAAGAAGAGATAAACAA (SEQ ID NO: 3085) | PE3 ngRNA spacer (AG PAM) |
| 2887 | AGTTAAACATCTCTTCTGGA (SEQ ID NO: 2887) | PE3 ngRNA spacer (GG PAM) |
| 2888 | ATATTTCCATTTACTCTTTT (SEQ ID NO: 2888) | PE3 ngRNA spacer (TG PAM) |
| 2889 | CATTTACTCTTTTTGCTGAT (SEQ ID NO: 2889) | PE3 ngRNA spacer (GG PAM) |
| 2890 | CCATTTACTCTTTTTGCTGA (SEQ ID NO: 2890) | PE3 ngRNA spacer (TG PAM) |
| 2892 | GAAAAGTTAAACATCTCTTC (SEQ ID NO: 2892) | PE3 ngRNA spacer (TG PAM) |
| 2569 | TCAGCATTAAACATTTCAAA (SEQ ID NO: 2569) | PE3 ngRNA spacer (AG PAM) |
| 2895 | TTTCCATTTACTCTTTTTGC (SEQ ID NO: 2895) | PE3 ngRNA spacer (TG PAM) |
| 2896 | TTTTTGCTGATGGCACATTC (SEQ ID NO: 2896) | PE3 ngRNA spacer (AG PAM) |
| 2897 | AAGTTAAACATCTCTTCTGGGTTTTAGAGCTAGA | PE3 ngRNA (AG PAM) |
| | AATAGCAAGTTAAAATAAGGCTAGTCCGTTATCA | |
| | ACTTGAAAAAGTGGCACCGAGTCGGTGC (SEQ ID | |
| | NO: 2897) | |
| 2898 | GAAAAGTTAAACATCTCTTCGTTTTAGAGCTAGA | PE3 ngRNA (TG PAM) |
| | AATAGCAAGTTAAAATAAGGCTAGTCCGTTATCA | |
| | ACTTGAAAAAGTGGCACCGAGTCGGTGC (SEQ ID | |
| | NO: 2898) | |
| 2899 | AAGTTAAACATCTCTTCTGGGTTTTAGAGCTAGA | PE3 ngRNA (AG PAM), contains end |
| | AATAGCAAGTTAAAATAAGGCTAGTCCGTTATCA | adaptations |
| | ACTTGAAAAAGTGGCACCGAGTCGGTGCTTTT | |
| | (SEQ ID NO: 2899) | |
| 2900 | GAAAAGTTAAACATCTCTTCGTTTTAGAGCTAGA | PE3 ngRNA (TG PAM), contains end |
| | AATAGCAAGTTAAAATAAGGCTAGTCCGTTATCA | adaptations |
| | ACTTGAAAAAGTGGCACCGAGTCGGTGCTTTT | |
| | (SEQ ID NO: 2900) | |

TABLE 45

| Sequence | | |
|---|---|---|
| Number | Sequence | Description |
| 3086 | CCTATAGATTACTATCC (SEQ ID NO: 3086) | PEgRNA spacer (TG; TGG PAM) |
| 3087 | ACCTATAGATTACTATCC (SEQ ID NO: 3087) | PEgRNA spacer (TG; TGG PAM) |
| 3088 | CACCTATAGATTACTATCC (SEQ ID NO: 3088) | PEgRNA spacer (TG; TGG PAM) |
| 2619 | GCACCTATAGATTACTATCC (SEQ ID NO: 2619) | PEgRNA spacer (TG; TGG PAM) |
| 3089 | TGCACCTATAGATTACTATCC (SEQ ID NO: 3089) | PEgRNA spacer (TG; TGG PAM) |
| 3090 | ATGCACCTATAGATTACTATCC (SEQ ID NO: 3090) | PEgRNA spacer (TG; TGG PAM) |
| 3091 | TAGTA | PBS |
| 3092 | TAGTAA | PBS |
| 3093 | TAGTAAT | PBS |
| 3094 | TAGTAATC | PBS |
| 3095 | TAGTAATCT | PBS |
| 3096 | TAGTAATCTA (SEQ ID NO: 3096) | PBS |
| 3097 | TAGTAATCTAT (SEQ ID NO: 3097) | PBS |
| 3098 | TAGTAATCTATA (SEQ ID NO: 3098) | PBS |
| 3099 | TAGTAATCTATAG (SEQ ID NO: 3099) | PBS |
| 3100 | TAGTAATCTATAGG (SEQ ID NO: 3100) | PBS |
| 3101 | TAGTAATCTATAGGT (SEQ ID NO: 3101) | PBS |
| 3102 | TAGTAATCTATAGGTG (SEQ ID NO: 3102) | PBS |
| 3103 | TAGTAATCTATAGGTGC (SEQ ID NO: 3103) | PBS |
| 3104 | TAGTAATCTATAGGTGCA (SEQ ID NO: 3104) | PBS |
| 3105 | TAGTAATCTATAGGTGCAT (SEQ ID NO: 3105) | PBS |
| 3106 | TCACATTTTTAAGCAAACCAGGA (SEQ ID NO: | RTT |
| | 3106) | |
| 3107 | CTCACATTTTTAAGCAAACCAGGA (SEQ ID NO: | RTT |
| | 3107) | |
| 3108 | ACTCACATTTTTAAGCAAACCAGGA (SEQ ID NO: | RTT |
| | 3108) | |
| 3109 | TACTCACATTTTTAAGCAAACCAGGA (SEQ ID | RTT |
| | NO: 3109) | |
| 3110 | ATACTCACATTTTTAAGCAAACCAGGA (SEQ ID | RTT |
| | NO: 3110) | |
| 3111 | AATACTCACATTTTTAAGCAAACCAGGA (SEQ ID | RTT |
| | NO: 3111) | |
| 3112 | AAATACTCACATTTTTAAGCAAACCAGGA (SEQ | RTT |
| | ID NO: 3112) | |
| 3113 | TAAATACTCACATTTTTAAGCAAACCAGGA (SEQ | RTT |
| | ID NO: 3113) | |
| 3114 | TTAAATACTCACATTTTTAAGCAAACCAGGA | RTT |
| | (SEQ ID NO: 3114) | |
| 3115 | TTTAAATACTCACATTTTTAAGCAAACCAGGA | RTT |
| | (SEQ ID NO: 3115) | |
| 3116 | TTTTAAATACTCACATTTTTAAGCAAACCAGGA | RTT |
| | (SEQ ID NO: 3116) | |
| 3117 | ATTTTAAATACTCACATTTTTAAGCAAACCAGGA | RTT |
| | (SEQ ID NO: 3117) | |
| 3118 | AATTTTAAATACTCACATTTTTAAGCAAACCAGG | RTT |
| | A (SEQ ID NO: 3118) | |
| 3119 | AAATTTTAAATACTCACATTTTTAAGCAAACCAG | RTT |
| | GA (SEQ ID NO: 3119) | |
| 3120 | TAAATTTTAAATACTCACATTTTTAAGCAAACCA | RTT |
| | GGA (SEQ ID NO: 3120) | |
| 3121 | ATAAATTTTAAATACTCACATTTTTAAGCAAACC | RTT |
| | AGGA (SEQ ID NO: 3121) | |
| 3122 | GATAAATTTTAAATACTCACATTTTTAAGCAAAC | RTT |
| | CAGGA (SEQ ID NO: 3122) | |
| 3123 | TGATAAATTTTAAATACTCACATTTTTAAGCAAA | RTT |
| | CCAGGA (SEQ ID NO: 3123) | |
| 2885 | AAAAGTTAAACATCTCTTCT (SEQ ID NO: 2885) | PE3 ngRNA spacer (GG PAM) |
| 2559 | AAACATCTCTTCTGGAGGAC (SEQ ID NO: 2559) | PE3 ngRNA spacer (TG PAM) |
| 2886 | AAGTTAAACATCTCTTCTGG (SEQ ID NO: 2886) | PE3 ngRNA spacer (AG; AGG PAM) |
| 2573 | AGCATTAAACATTTCAAAAG (SEQ ID NO: 2573) | PE3 ngRNA spacer (TG PAM) |
| 2887 | AGTTAAACATCTCTTCTGGA (SEQ ID NO: 2887) | PE3 ngRNA spacer (GG PAM) |
| 2888 | ATATTTCCATTTACTCTTTT (SEQ ID NO: 2888) | PE3 ngRNA spacer (TG PAM) |
| 2561 | ATTTTTAAGCAAACCAGGAT (SEQ ID NO: 2561) | PE3 ngRNA spacer (AG PAM) |
| 2889 | CATTTACTCTTTTTGCTGAT (SEQ ID NO: 2889) | PE3 ngRNA spacer (GG PAM) |
| 2890 | CCATTTACTCTTTTTGCTGA (SEQ ID NO: 2890) | PE3 ngRNA spacer (TG; TGG PAM) |
| 2891 | CTCACATTTTTAAGCAAACC (SEQ ID NO: 2891) | PE3b ngRNA spacer (AG; AGG PAM) |
| 2892 | GAAAAGTTAAACATCTCTTC (SEQ ID NO: 2892) | PE3 ngRNA spacer (TG; TGG PAM) |
| 2893 | TCACATTTTTAAGCAAACCA (SEQ ID NO: 2893) | PE3b ngRNA spacer (GG PAM) |
| 2569 | TCAGCATTAAACATTTCAAA (SEQ ID NO: 2569) | PE3 ngRNA spacer (AG PAM) |
| 2894 | TTTAAATACTCACATTTTTA (SEQ ID NO: 2894) | PE3b ngRNA spacer (AG PAM) |
| 2895 | TTTCCATTTACTCTTTTTGC (SEQ ID NO: 2895) | PE3 ngRNA spacer (TG PAM) |
| 2896 | TTTTTGCTGATGGCACATTC (SEQ ID NO: 2896) | PE3 ngRNA spacer (AG PAM) |
| 3124 | GCACCTATAGATTACTATCCGTTTTAGAGCTAGA | pegRNA |
| | AATAGCAAGTTAAAATAAGGCTAGTCCGTTATCA | |
| | ACTTGAAAAAGTGGCACCGAGTCGGTGCATACT | |
| | CACATTTTTAAGCAAACCAGGATAGTAATC (SEQ | |
| | ID NO: 3124) | |
| 3125 | GCACCTATAGATTACTATCCGTTTTAGAGCTAGA | pegRNA |
| | AATAGCAAGTTAAAATAAGGCTAGTCCGTTATCA | |
| | ACTTGAAAAAGTGGCACCGAGTCGGTGCATACT | |
| | CACATTTTTAAGCAAACCAGGATAGTAATCTA | |
| | (SEQ ID NO: 3125) | |
| 3126 | GCACCTATAGATTACTATCCGTTTTAGAGCTAGA | pegRNA |
| | AATAGCAAGTTAAAATAAGGCTAGTCCGTTATCA | |
| | ACTTGAAAAAGTGGCACCGAGTCGGTGCAAATA | |
| | CTCACATTTTTAAGCAAACCAGGATAGTAATC | |
| | (SEQ ID NO: 3126) | |
| 3127 | GCACCTATAGATTACTATCCGTTTTAGAGCTAGA | pegRNA, contains end adaptations |
| | AATAGCAAGTTAAAATAAGGCTAGTCCGTTATCA | |
| | ACTTGAAAAAGTGGCACCGAGTCGGTGCATACT | |
| | CACATTTTTAAGCAAACCAGGATAGTAATCTTTT | |
| | (SEQ ID NO: 3127) | |
| 3128 | GCACCTATAGATTACTATCCGTTTTAGAGCTAGA | pegRNA |
| | AATAGCAAGTTAAAATAAGGCTAGTCCGTTATCA | |
| | ACTTGAAAAAGTGGCACCGAGTCGGTGCATACT | |
| | CACATTTTTAAGCAAACCAGGATAGTAATCTATA | |
| | (SEQ ID NO: 3128) | |
| 3129 | GCACCTATAGATTACTATCCGTTTTAGAGCTAGA | pegRNA |
| | AATAGCAAGTTAAAATAAGGCTAGTCCGTTATCA | |
| | ACTTGAAAAAGTGGCACCGAGTCGGTGCAAATA | |
| | CTCACATTTTTAAGCAAACCAGGATAGTAATCTA | |
| | (SEQ ID NO: 3129) | |
| 3130 | GCACCTATAGATTACTATCCGTTTTAGAGCTAGA | pegRNA |
| | AATAGCAAGTTAAAATAAGGCTAGTCCGTTATCA | |
| | ACTTGAAAAAGTGGCACCGAGTCGGTGCTTAAA | |
| | TACTCACATTTTTAAGCAAACCAGGATAGTAATC | |
| | (SEQ ID NO: 3130) | |
| 3131 | GCACCTATAGATTACTATCCGTTTTAGAGCTAGA | pegRNA, contains end adaptations |
| | AATAGCAAGTTAAAATAAGGCTAGTCCGTTATCA | |
| | ACTTGAAAAAGTGGCACCGAGTCGGTGCATACT | |
| | CACATTTTTAAGCAAACCAGGATAGTAATCTATT | |
| | TT (SEQ ID NO: 3131) | |
| 3132 | GCACCTATAGATTACTATCCGTTTTAGAGCTAGA | pegRNA, contains end adaptations |
| | AATAGCAAGTTAAAATAAGGCTAGTCCGTTATCA | |
| | ACTTGAAAAAGTGGCACCGAGTCGGTGCAAATA | |
| | CTCACATTTTTAAGCAAACCAGGATAGTAATCTT | |
| | TT (SEQ ID NO: 3132) | |
| 3133 | GCACCTATAGATTACTATCCGTTTTAGAGCTAGA | pegRNA |
| | AATAGCAAGTTAAAATAAGGCTAGTCCGTTATCA | |
| | ACTTGAAAAAGTGGCACCGAGTCGGTGCATACT | |
| | CACATTTTTAAGCAAACCAGGATAGTAATCTATA | |
| | GG (SEQ ID NO: 3133) | |
| 3134 | GCACCTATAGATTACTATCCGTTTTAGAGCTAGA | pegRNA |
| | AATAGCAAGTTAAAATAAGGCTAGTCCGTTATCA | |
| | ACTTGAAAAAGTGGCACCGAGTCGGTGCAAATA | |
| | CTCACATTTTTAAGCAAACCAGGATAGTAATCTA | |
| | TA (SEQ ID NO: 3134) | |
| 3135 | GCACCTATAGATTACTATCCGTTTTAGAGCTAGA | pegRNA |
| | AATAGCAAGTTAAAATAAGGCTAGTCCGTTATCA | |
| | ACTTGAAAAAGTGGCACCGAGTCGGTGCTTAAA | |
| | TACTCACATTTTTAAGCAAACCAGGATAGTAATC | |
| | TA (SEQ ID NO: 3135) | |
| 3136 | GCACCTATAGATTACTATCCGTTTTAGAGCTAGA | pegRNA |
| | AATAGCAAGTTAAAATAAGGCTAGTCCGTTATCA | |
| | ACTTGAAAAAGTGGCACCGAGTCGGTGCTTTTAA | |
| | ATACTCACATTTTTAAGCAAACCAGGATAGTAAT | |
| | C (SEQ ID NO: 3136) | |
| 3137 | GCACCTATAGATTACTATCCGTTTTAGAGCTAGA | pegRNA, contains end adaptations |
| | AATAGCAAGTTAAAATAAGGCTAGTCCGTTATCA | |
| | ACTTGAAAAAGTGGCACCGAGTCGGTGCATACT | |
| | CACATTTTTAAGCAAACCAGGATAGTAATCTATA | |
| | TTTT (SEQ ID NO: 3137) | |
| 3138 | GCACCTATAGATTACTATCCGTTTTAGAGCTAGA | pegRNA, contains end adaptations |
| | AATAGCAAGTTAAAATAAGGCTAGTCCGTTATCA | |
| | ACTTGAAAAAGTGGCACCGAGTCGGTGCAAATA | |
| | CTCACATTTTTAAGCAAACCAGGATAGTAATCTA | |
| | TTTT (SEQ ID NO: 3138) | |
| 3139 | GCACCTATAGATTACTATCCGTTTTAGAGCTAGA | pegRNA, contains end adaptations |
| | AATAGCAAGTTAAAATAAGGCTAGTCCGTTATCA | |
| | ACTTGAAAAAGTGGCACCGAGTCGGTGCTTAAA | |
| | TACTCACATTTTTAAGCAAACCAGGATAGTAATC | |
| | TTTT (SEQ ID NO: 3139) | |
| 3140 | GCACCTATAGATTACTATCCGTTTTAGAGCTAGA | pegRNA |
| | AATAGCAAGTTAAAATAAGGCTAGTCCGTTATCA | |
| | ACTTGAAAAAGTGGCACCGAGTCGGTGCAAATA | |
| | CTCACATTTTTAAGCAAACCAGGATAGTAATCTA | |
| | TAGG (SEQ ID NO: 3140) | |
| 3141 | GCACCTATAGATTACTATCCGTTTTAGAGCTAGA | pegRNA |
| | AATAGCAAGTTAAAATAAGGCTAGTCCGTTATCA | |
| | ACTTGAAAAAGTGGCACCGAGTCGGTGCTTAAA | |
| | TACTCACATTTTTAAGCAAACCAGGATAGTAATC | |
| | TATA (SEQ ID NO: 3141) | |
| 3142 | GCACCTATAGATTACTATCCGTTTTAGAGCTAGA | pegRNA |
| | AATAGCAAGTTAAAATAAGGCTAGTCCGTTATCA | |
| | ACTTGAAAAAGTGGCACCGAGTCGGTGCTTTTAA | |
| | ATACTCACATTTTTAAGCAAACCAGGATAGTAAT | |
| | CTA (SEQ ID NO: 3142) | |
| 3143 | GCACCTATAGATTACTATCCGTTTTAGAGCTAGA | pegRNA, contains end adaptations |
| | AATAGCAAGTTAAAATAAGGCTAGTCCGTTATCA | |
| | ACTTGAAAAAGTGGCACCGAGTCGGTGCATACT | |
| | CACATTTTTAAGCAAACCAGGATAGTAATCTATA | |
| | GGTTTT (SEQ ID NO: 3143) | |
| 3144 | GCACCTATAGATTACTATCCGTTTTAGAGCTAGA | pegRNA, contains end adaptations |
| | AATAGCAAGTTAAAATAAGGCTAGTCCGTTATCA | |
| | ACTTGAAAAAGTGGCACCGAGTCGGTGCAAATA | |
| | CTCACATTTTTAAGCAAACCAGGATAGTAATCTA | |
| | TATTTT (SEQ ID NO: 3144) | |
| 3145 | GCACCTATAGATTACTATCCGTTTTAGAGCTAGA | pegRNA, contains end adaptations |
| | AATAGCAAGTTAAAATAAGGCTAGTCCGTTATCA | |
| | ACTTGAAAAAGTGGCACCGAGTCGGTGCTTAAA | |
| | TACTCACATTTTTAAGCAAACCAGGATAGTAATC | |
| | TATTTT (SEQ ID NO: 3145) | |
| 3146 | GCACCTATAGATTACTATCCGTTTTAGAGCTAGA | pegRNA, contains end adaptations |
| | AATAGCAAGTTAAAATAAGGCTAGTCCGTTATCA | |
| | ACTTGAAAAAGTGGCACCGAGTCGGTGCTTTTAA | |
| | ATACTCACATTTTTAAGCAAACCAGGATAGTAAT | |
| | CTTTT (SEQ ID NO: 3146) | |
| 3147 | GCACCTATAGATTACTATCCGTTTTAGAGCTAGA | pegRNA |
| | AATAGCAAGTTAAAATAAGGCTAGTCCGTTATCA | |
| | ACTTGAAAAAGTGGCACCGAGTCGGTGCTTAAA | |
| | TACTCACATTTTTAAGCAAACCAGGATAGTAATC | |
| | TATAGG (SEQ ID NO: 3147) | |
| 3148 | GCACCTATAGATTACTATCCGTTTTAGAGCTAGA | pegRNA |
| | AATAGCAAGTTAAAATAAGGCTAGTCCGTTATCA | |
| | ACTTGAAAAAGTGGCACCGAGTCGGTGCTTTTAA | |
| | ATACTCACATTTTTAAGCAAACCAGGATAGTAAT | |
| | CTATA (SEQ ID NO: 3148) | |
| 3149 | GCACCTATAGATTACTATCCGTTTTAGAGCTAGA | pegRNA, contains end adaptations |
| | AATAGCAAGTTAAAATAAGGCTAGTCCGTTATCA | |
| | ACTTGAAAAAGTGGCACCGAGTCGGTGCAAATA | |
| | CTCACATTTTTAAGCAAACCAGGATAGTAATCTA | |
| | TAGGTTTT (SEQ ID NO: 3149) | |
| 3150 | GCACCTATAGATTACTATCCGTTTTAGAGCTAGA | pegRNA, contains end adaptations |
| | AATAGCAAGTTAAAATAAGGCTAGTCCGTTATCA | |
| | ACTTGAAAAAGTGGCACCGAGTCGGTGCTTAAA | |
| | TACTCACATTTTTAAGCAAACCAGGATAGTAATC | |
| | TATATTTT (SEQ ID NO: 3150) | |
| 3151 | GCACCTATAGATTACTATCCGTTTTAGAGCTAGA | pegRNA, contains end adaptations |
| | AATAGCAAGTTAAAATAAGGCTAGTCCGTTATCA | |
| | ACTTGAAAAAGTGGCACCGAGTCGGTGCTTTTAA | |
| | ATACTCACATTTTTAAGCAAACCAGGATAGTAAT | |
| | CTATTTT (SEQ ID NO: 3151) | |
| 3152 | GCACCTATAGATTACTATCCGTTTTAGAGCTAGA | pegRNA |
| | AATAGCAAGTTAAAATAAGGCTAGTCCGTTATCA | |
| | ACTTGAAAAAGTGGCACCGAGTCGGTGCTTTTAA | |
| | ATACTCACATTTTTAAGCAAACCAGGATAGTAAT | |
| | CTATAGG (SEQ ID NO: 3152) | |
| 3153 | GCACCTATAGATTACTATCCGTTTTAGAGCTAGA | pegRNA, contains end adaptations |
| | AATAGCAAGTTAAAATAAGGCTAGTCCGTTATCA | |
| | ACTTGAAAAAGTGGCACCGAGTCGGTGCTTAAA | |
| | TACTCACATTTTTAAGCAAACCAGGATAGTAATC | |
| | TATAGGTTTT (SEQ ID NO: 3153) | |
| 3154 | GCACCTATAGATTACTATCCGTTTTAGAGCTAGA | pegRNA, contains end adaptations |
| | AATAGCAAGTTAAAATAAGGCTAGTCCGTTATCA | |
| | ACTTGAAAAAGTGGCACCGAGTCGGTGCTTTTAA | |
| | ATACTCACATTTTTAAGCAAACCAGGATAGTAAT | |
| | CTATATTTT (SEQ ID NO: 3154) | |
| 3155 | GCACCTATAGATTACTATCCGTTTTAGAGCTAGA | pegRNA, contains end adaptations |
| | AATAGCAAGTTAAAATAAGGCTAGTCCGTTATCA | |
| | ACTTGAAAAAGTGGCACCGAGTCGGTGCTTTTAA | |
| | ATACTCACATTTTTAAGCAAACCAGGATAGTAAT | |
| | CTATAGGTTTT (SEQ ID NO: 3155) | |
| 2897 | AAGTTAAACATCTCTTCTGGGTTTTAGAGCTAGA | PE3 ngRNA (AG; AGG PAM) |
| | AATAGCAAGTTAAAATAAGGCTAGTCCGTTATCA | |
| | ACTTGAAAAAGTGGCACCGAGTCGGTGC (SEQ ID | |
| | NO: 2897) | |
| 2898 | GAAAAGTTAAACATCTCTTCGTTTTAGAGCTAGA | PE3 ngRNA (TG; TGG PAM) |
| | AATAGCAAGTTAAAATAAGGCTAGTCCGTTATCA | |
| | ACTTGAAAAAGTGGCACCGAGTCGGTGC (SEQ ID | |
| | NO: 2898) | |
| 2899 | AAGTTAAACATCTCTTCTGGGTTTTAGAGCTAGA | PE3 ngRNA (AG; AGG PAM), contains end |
| | AATAGCAAGTTAAAATAAGGCTAGTCCGTTATCA | adaptations |
| | ACTTGAAAAAGTGGCACCGAGTCGGTGCTTTT | |
| | (SEQ ID NO: 2899) | |
| 2900 | GAAAAGTTAAACATCTCTTCGTTTTAGAGCTAGA | PE3 ngRNA (TG; TGG PAM), contains end |
| | AATAGCAAGTTAAAATAAGGCTAGTCCGTTATCA | adaptations |
| | ACTTGAAAAAGTGGCACCGAGTCGGTGCTTTT | |
| | (SEQ ID NO: 2900) | |

TABLE 46

| Sequence | | |
|---|---|---|
| Number | Sequence | Description |
| 3156 | CTTGGGTATGCACCTAT (SEQ ID NO: 3156) | PEgRNA spacer (AG;AGA PAM) |
| 3157 | TCTTGGGTATGCACCTAT (SEQ ID NO: 3157) | PEgRNA spacer (AG;AGA PAM) |
| 3158 | GTCTTGGGTATGCACCTAT (SEQ ID NO: 3158) | PEgRNA spacer (AG;AGA PAM) |
| 2622 | GGTCTTGGGTATGCACCTAT (SEQ ID NO: 2622) | PEgRNA spacer (AG;AGA PAM) |
| 3159 | AGGTCTTGGGTATGCACCTAT (SEQ ID NO: 3159) | PEgRNA spacer (AG;AGA PAM) |
| 3160 | AAGGTCTTGGGTATGCACCTAT (SEQ ID NO: 3160) | PEgRNA spacer (AG;AGA PAM) |
| 3161 | GGTGC | PBS |
| 3162 | GGTGCA | PBS |
| 3163 | GGTGCAT | PBS |
| 3164 | GGTGCATA | PBS |
| 3165 | GGTGCATAC | PBS |
| 3166 | GGTGCATACC (SEQ ID NO: 3166) | PBS |
| 3167 | GGTGCATACCC (SEQ ID NO: 3167) | PBS |
| 3168 | GGTGCATACCCA (SEQ ID NO: 3168) | PBS |
| 3169 | GGTGCATACCCAA (SEQ ID NO: 3169) | PBS |
| 3170 | GGTGCATACCCAAG (SEQ ID NO: 3170) | PBS |
| 3171 | GGTGCATACCCAAGA (SEQ ID NO: 3171) | PBS |
| 3172 | GGTGCATACCCAAGAC (SEQ ID NO: 3172) | PBS |
| 3173 | GGTGCATACCCAAGACC (SEQ ID NO: 3173) | PBS |
| 3174 | GGTGCATACCCAAGACCT (SEQ ID NO: 3174) | PBS |
| 3175 | GGTGCATACCCAAGACCTT (SEQ ID NO: 3175) | PBS |
| 3176 | TCACATTTTTAAGCAAACCAGGATAGTAATCTAT | RTT |
| | A (SEQ ID NO: 3176) | |
| 3177 | CTCACATTTTTAAGCAAACCAGGATAGTAATCTA | RTT |
| | TA (SEQ ID NO: 3177) | |
| 3178 | ACTCACATTTTTAAGCAAACCAGGATAGTAATCT | RTT |
| | ATA (SEQ ID NO: 3178) | |
| 3179 | TACTCACATTTTTAAGCAAACCAGGATAGTAATC | RTT |
| | TATA (SEQ ID NO: 3179) | |
| 3180 | ATACTCACATTTTTAAGCAAACCAGGATAGTAAT | RTT |
| | CTATA (SEQ ID NO: 3180) | |
| 3181 | AATACTCACATTTTTAAGCAAACCAGGATAGTAA | RTT |
| | TCTATA (SEQ ID NO: 3181) | |
| 2559 | AAACATCTCTTCTGGAGGAC (SEQ ID NO: 2559) | PE3 ngRNA spacer (TG;TGA PAM) |
| 3182 | AAACCAGGATAGTAATCTAT (SEQ ID NO: 3182) | PE3 ngRNA spacer (AG PAM) |
| 3183 | AACCAGGATAGTAATCTATA (SEQ ID NO: 3183) | PE3 ngRNA spacer (GG PAM) |
| 2886 | AAGTTAAACATCTCTTCTGG (SEQ ID NO: 2886) | PE3 ngRNA spacer (AG PAM) |
| 2573 | AGCATTAAACATTTCAAAAG (SEQ ID NO: 2573) | PE3 ngRNA spacer (TG;TGA PAM) |
| 2887 | AGTTAAACATCTCTTCTGGA (SEQ ID NO: 2887) | PE3 ngRNA spacer (GG;GGA PAM) |
| 2888 | ATATTTCCATTTACTCTTTT (SEQ ID NO: 2888) | PE3 ngRNA spacer (TG PAM) |
| 2561 | ATTTTTAAGCAAACCAGGAT (SEQ ID NO: 2561) | PE3 ngRNA spacer (AG PAM) |
| 2889 | CATTTACTCTTTTTGCTGAT (SEQ ID NO: 2889) | PE3 ngRNA spacer (GG PAM) |
| 3184 | CCAGGATAGTAATCTATAGG (SEQ ID NO: 3184) | PE3 ngRNA spacer (TG PAM) |
| 2890 | CCATTTACTCTTTTTGCTGA (SEQ ID NO: 2890) | PE3 ngRNA spacer (TG PAM) |
| 2891 | CTCACATTTTTAAGCAAACC (SEQ ID NO: 2891) | PE3b ngRNA spacer (AG PAM) |
| 2893 | TCACATTTTTAAGCAAACCA (SEQ ID NO: 2893) | PE3b ngRNA spacer (GG;GGA PAM) |
| 2569 | TCAGCATTAAACATTTCAAA (SEQ ID NO: 2569) | PE3 ngRNA spacer (AG PAM) |
| 2894 | TTTAAATACTCACATTTTTA (SEQ ID NO: 2894) | PE3b ngRNA spacer (AG PAM) |
| 2895 | TTTCCATTTACTCTTTTTGC (SEQ ID NO: 2895) | PE3 ngRNA spacer (TG;TGA PAM) |
| 2896 | TTTTTGCTGATGGCACATTC (SEQ ID NO: 2896) | PE3 ngRNA spacer (AG PAM) |
| 2897 | AAGTTAAACATCTCTTCTGGGTTTTAGAGCTAGA | PE3 ngRNA (AG PAM) |
| | AATAGCAAGTTAAAATAAGGCTAGTCCGTTATCA | |
| | ACTTGAAAAAGTGGCACCGAGTCGGTGC (SEQ ID | |
| | NO: 2897) | |
| 2899 | AAGTTAAACATCTCTTCTGGGTTTTAGAGCTAGA | PE3 ngRNA (AG PAM), contains end |
| | AATAGCAAGTTAAAATAAGGCTAGTCCGTTATCA | adaptations |
| | ACTTGAAAAAGTGGCACCGAGTCGGTGCTTTT | |
| | (SEQ ID NO: 2899) | |

TABLE 47

| Sequence | | |
|---|---|---|
| Number | Sequence | Description |
| 3185 | AGATTACTATCCTGGTT (SEQ ID NO: 3185) | PEgRNA spacer (TG PAM) |
| 3186 | TAGATTACTATCCTGGTT (SEQ ID NO: 3186) | PEgRNA spacer (TG PAM) |
| 3187 | ATAGATTACTATCCTGGTT (SEQ ID NO: 3187) | PEgRNA spacer (TG PAM) |
| 2624 | TATAGATTACTATCCTGGTT (SEQ ID NO: 2624) | PEgRNA spacer (TG PAM) |
| 3188 | CTATAGATTACTATCCTGGTT (SEQ ID NO: 3188) | PEgRNA spacer (TG PAM) |
| 3189 | CCTATAGATTACTATCCTGGTT (SEQ ID NO: 3189) | PEgRNA spacer (TG PAM) |
| 3190 | CAGGA | PBS |
| 3191 | CAGGAT | PBS |
| 3192 | CAGGATA | PBS |
| 3193 | CAGGATAG | PBS |
| 3194 | CAGGATAGT | PBS |
| 3195 | CAGGATAGTA (SEQ ID NO: 3195) | PBS |
| 3196 | CAGGATAGTAA (SEQ ID NO: 3196) | PBS |
| 3197 | CAGGATAGTAAT (SEQ ID NO: 3197) | PBS |
| 3198 | CAGGATAGTAATC (SEQ ID NO: 3198) | PBS |
| 3199 | CAGGATAGTAATCT (SEQ ID NO: 3199) | PBS |
| 3200 | CAGGATAGTAATCTA (SEQ ID NO: 3200) | PBS |
| 3201 | CAGGATAGTAATCTAT (SEQ ID NO: 3201) | PBS |
| 3202 | CAGGATAGTAATCTATA (SEQ ID NO: 3202) | PBS |
| 3203 | CAGGATAGTAATCTATAG (SEQ ID NO: 3203) | PBS |
| 3204 | CAGGATAGTAATCTATAGG (SEQ ID NO: 3204) | PBS |
| 3205 | TCACATTTTTAAGAAGAC (SEQ ID NO: 3205) | RTT*1,6,11 (TG-to-TT PAM silencing edit) |
| 3206 | TCACATTTTTAAGCAAAC (SEQ ID NO: 3206) | RTT*2,7,11 |
| 3207 | TCACATTTTTAAGGAGAC (SEQ ID NO: 3207) | RTT*3,8,11 (TG-to-TC PAM silencing edit) |
| 3208 | TCACATTTTTAAGTAAAC (SEQ ID NO: 3208) | RTT*4,9,11 (TG-to-TA PAM silencing edit) |
| 3209 | TCACATTTTTAAGTAGAC (SEQ ID NO: 3209) | RTT*5,10,11 (TG-to-TA PAM silencing edit) |
| 3210 | CTCACATTTTTAAGAAGAC (SEQ ID NO: 3210) | RTT*1,6,11 (TG-to-TT PAM silencing edit) |
| 3211 | CTCACATTTTTAAGCAAAC (SEQ ID NO: 3211) | RTT*2,7,11 |
| 3212 | CTCACATTTTTAAGGAGAC (SEQ ID NO: 3212) | RTT*3,8,11 (TG-to-TC PAM silencing edit) |
| 3213 | CTCACATTTTTAAGTAAAC (SEQ ID NO: 3213) | RTT*4,9,11 (TG-to-TA PAM silencing edit) |
| 3214 | CTCACATTTTTAAGTAGAC (SEQ ID NO: 3214) | RTT*5,10,11 (TG-to-TA PAM silencing edit) |
| 3215 | ACTCACATTTTTAAGAAGAC (SEQ ID NO: 3215) | RTT*1,6,11 (TG-to-TT PAM silencing edit) |
| 2560 | ACTCACATTTTTAAGCAAAC (SEQ ID NO: 2560) | RTT*2,7,11 |
| 3216 | ACTCACATTTTTAAGGAGAC (SEQ ID NO: 3216) | RTT*3,8,11 (TG-to-TC PAM silencing edit) |
| 3217 | ACTCACATTTTTAAGTAAAC (SEQ ID NO: 3217) | RTT*4,9,11 (TG-to-TA PAM silencing edit) |
| 3218 | ACTCACATTTTTAAGTAGAC (SEQ ID NO: 3218) | RTT*5,10,11 (TG-to-TA PAM silencing edit) |
| 3219 | TACTCACATTTTTAAGAAGAC (SEQ ID NO: 3219) | RTT*1,6,11 (TG-to-TT PAM silencing edit) |
| 3220 | TACTCACATTTTTAAGCAAAC (SEQ ID NO: 3220) | RTT*2,7,11 |
| 3221 | TACTCACATTTTTAAGGAGAC (SEQ ID NO: 3221) | RTT*3,8,11 (TG-to-TC PAM silencing edit) |
| 3222 | TACTCACATTTTTAAGTAAAC (SEQ ID NO: 3222) | RTT*4,9,11 (TG-to-TA PAM silencing edit) |
| 3223 | TACTCACATTTTTAAGTAGAC (SEQ ID NO: 3223) | RTT*5,10,11 (TG-to-TA PAM silencing edit) |
| 3224 | ATACTCACATTTTTAAGAAGAC (SEQ ID NO: 3224) | RTT*1,6,11 (TG-to-TT PAM silencing edit) |
| 3225 | ATACTCACATTTTTAAGCAAAC (SEQ ID NO: 3225) | RTT*2,7,11 |
| 3226 | ATACTCACATTTTTAAGGAGAC (SEQ ID NO: 3226) | RTT*3,8,11 (TG-to-TC PAM silencing edit) |
| 3227 | ATACTCACATTTTTAAGTAAAC (SEQ ID NO: 3227) | RTT*4,9,11 (TG-to-TA PAM silencing edit) |
| 3228 | ATACTCACATTTTTAAGTAGAC (SEQ ID NO: 3228) | RTT*5,10,11 (TG-to-TA PAM silencing edit) |
| 3229 | AATACTCACATTTTTAAGAAGAC (SEQ ID NO: | RTT*1,6,11 (TG-to-TT PAM silencing edit) |
| | 3229) | |
| 3230 | AATACTCACATTTTTAAGCAAAC (SEQ ID NO: | RTT*2,7,11 |
| | 3230) | |
| 3231 | AATACTCACATTTTTAAGGAGAC (SEQ ID NO: | RTT*3,8,11 (TG-to-TC PAM silencing edit) |
| | 3231) | |
| 3232 | AATACTCACATTTTTAAGTAAAC (SEQ ID NO: | RTT*4,9,11 (TG-to-TA PAM silencing edit) |
| | 3232) | |
| 3233 | AATACTCACATTTTTAAGTAGAC (SEQ ID NO: | RTT*5,10,11 (TG-to-TA PAM silencing edit) |
| | 3233) | |
| 3234 | AAATACTCACATTTTTAAGAAGAC (SEQ ID NO: | RTT*1,6,11 (TG-to-TT PAM silencing edit) |
| | 3234) | |
| 3235 | AAATACTCACATTTTTAAGCAAAC (SEQ ID NO: | RTT*2,7,11 |
| | 3235) | |
| 3236 | AAATACTCACATTTTTAAGGAGAC (SEQ ID NO: | RTT*3,8,11 (TG-to-TC PAM silencing edit) |
| | 3236) | |
| 3237 | AAATACTCACATTTTTAAGTAAAC (SEQ ID NO: | RTT*4,9,11 (TG-to-TA PAM silencing edit) |
| | 3237) | |
| 3238 | AAATACTCACATTTTTAAGTAGAC (SEQ ID NO: | RTT*5,10,11 (TG-to-TA PAM silencing edit) |
| | 3238) | |
| 3239 | TAAATACTCACATTTTTAAGAAGAC (SEQ ID NO: | RTT*1,6,11 (TG-to-TT PAM silencing edit) |
| | 3239) | |
| 3240 | TAAATACTCACATTTTTAAGCAAAC (SEQ ID NO: | RTT*2,7,11 |
| | 3240) | |
| 3241 | TAAATACTCACATTTTTAAGGAGAC (SEQ ID NO: | RTT*3,8,11 (TG-to-TC PAM silencing edit) |
| | 3241) | |
| 3242 | TAAATACTCACATTTTTAAGTAAAC (SEQ ID NO: | RTT*4,9,11 (TG-to-TA PAM silencing edit) |
| | 3242) | |
| 3243 | TAAATACTCACATTTTTAAGTAGAC (SEQ ID NO: | RTT*5,10,11 (TG-to-TA PAM silencing edit) |
| | 3243) | |
| 3244 | TTAAATACTCACATTTTTAAGAAGAC (SEQ ID | RTT*1,6,11 (TG-to-TT PAM silencing edit) |
| | NO: 3244) | |
| 3245 | TTAAATACTCACATTTTTAAGCAAAC (SEQ ID NO: | RTT*2,7,11 |
| | 3245) | |
| 3246 | TTAAATACTCACATTTTTAAGGAGAC (SEQ ID | RTT*3,8,11 (TG-to-TC PAM silencing edit) |
| | NO: 3246) | |
| 3247 | TTAAATACTCACATTTTTAAGTAAAC (SEQ ID NO: | RTT*4,9,11 (TG-to-TA PAM silencing edit) |
| | 3247) | |
| 3248 | TTAAATACTCACATTTTTAAGTAGAC (SEQ ID NO: | RTT*5,10,11 (TG-to-TA PAM silencing edit) |
| | 3248) | |
| 3249 | TTTAAATACTCACATTTTTAAGAAGAC (SEQ ID | RTT*1,6,11 (TG-to-TT PAM silencing edit) |
| | NO: 3249) | |
| 3250 | TTTAAATACTCACATTTTTAAGCAAAC (SEQ ID | RTT*2,7,11 |
| | NO: 3250) | |
| 3251 | TTTAAATACTCACATTTTTAAGGAGAC (SEQ ID | RTT*3,8,11 (TG-to-TC PAM silencing edit) |
| | NO: 3251) | |
| 3252 | TTTAAATACTCACATTTTTAAGTAAAC (SEQ ID | RTT*4,9,11 (TG-to-TA PAM silencing edit) |
| | NO: 3252) | |
| 3253 | TTTAAATACTCACATTTTTAAGTAGAC (SEQ ID | RTT*5,10,11 (TG-to-TA PAM silencing edit) |
| | NO: 3253) | |
| 3254 | TTTTAAATACTCACATTTTTAAGAAGAC (SEQ ID | RTT*1,6,11 (TG-to-TT PAM silencing edit) |
| | NO: 3254) | |
| 3255 | TTTTAAATACTCACATTTTTAAGCAAAC (SEQ ID | RTT*2,7,11 |
| | NO: 3255) | |
| 3256 | TTTTAAATACTCACATTTTTAAGGAGAC (SEQ ID | RTT*3,8,11 (TG-to-TC PAM silencing edit) |
| | NO: 3256) | |
| 3257 | TTTTAAATACTCACATTTTTAAGTAAAC (SEQ ID | RTT*4,9,11 (TG-to-TA PAM silencing edit) |
| | NO: 3257) | |
| 3258 | TTTTAAATACTCACATTTTTAAGTAGAC (SEQ ID | RTT*5,10,11 (TG-to-TA PAM silencing edit) |
| | NO: 3258) | |
| 3259 | ATTTTAAATACTCACATTTTTAAGAAGAC (SEQ ID | RTT*1,6,11 (TG-to-TT PAM silencing edit) |
| | NO: 3259) | |
| 3260 | ATTTTAAATACTCACATTTTTAAGCAAAC (SEQ ID | RTT*2,7,11 |
| | NO: 3260) | |
| 3261 | ATTTTAAATACTCACATTTTTAAGGAGAC (SEQ ID | RTT*3,8,11 (TG-to-TC PAM silencing edit) |
| | NO: 3261) | |
| 3262 | ATTTTAAATACTCACATTTTTAAGTAAAC (SEQ ID | RTT*4,9,11 (TG-to-TA PAM silencing edit) |
| | NO: 3262) | |
| 3263 | ATTTTAAATACTCACATTTTTAAGTAGAC (SEQ ID | RTT*5,10,11 (TG-to-TA PAM silencing edit) |
| | NO: 3263) | |
| 3264 | AATTTTAAATACTCACATTTTTAAGAAGAC (SEQ | RTT*1,6,11 (TG-to-TT PAM silencing edit) |
| | ID NO: 3264) | |
| 3265 | AATTTTAAATACTCACATTTTTAAGCAAAC (SEQ | RTT*2,7,11 |
| | ID NO: 3265) | |
| 3266 | AATTTTAAATACTCACATTTTTAAGGAGAC (SEQ | RTT*3,8,11 (TG-to-TC PAM silencing edit) |
| | ID NO: 3266) | |
| 3267 | AATTTTAAATACTCACATTTTTAAGTAAAC (SEQ | RTT*4,9,11 (TG-to-TA PAM silencing edit) |
| | ID NO: 3267) | |
| 3268 | AATTTTAAATACTCACATTTTTAAGTAGAC (SEQ | RTT*5,10,11 (TG-to-TA PAM silencing edit) |
| | ID NO: 3268) | |
| 3269 | AAATTTTAAATACTCACATTTTTAAGAAGAC | RTT*1,6,11 (TG-to-TT PAM silencing edit) |
| | (SEQ ID NO: 3269) | |
| 3270 | AAATTTTAAATACTCACATTTTTAAGCAAAC | RTT*2,7,11 |
| | (SEQ ID NO: 3270) | |
| 3271 | AAATTTTAAATACTCACATTTTTAAGGAGAC | RTT*3,8,11 (TG-to-TC PAM silencing edit) |
| | (SEQ ID NO: 3271) | |
| 3272 | AAATTTTAAATACTCACATTTTTAAGTAAAC | RTT*4,9,11 (TG-to-TA PAM silencing edit) |
| | (SEQ ID NO: 3272) | |
| 3273 | AAATTTTAAATACTCACATTTTTAAGTAGAC | RTT*5,10,11 (TG-to-TA PAM silencing edit) |
| | (SEQ ID NO: 3273) | |
| 3274 | TAAATTTTAAATACTCACATTTTTAAGAAGAC | RTT*1,6,11 (TG-to-TT PAM silencing edit) |
| | (SEQ ID NO: 3274) | |
| 3275 | TAAATTTTAAATACTCACATTTTTAAGCAAAC | RTT*2,7,11 |
| | (SEQ ID NO: 3275) | |
| 3276 | TAAATTTTAAATACTCACATTTTTAAGGAGAC | RTT*3,8,11 (TG-to-TC PAM silencing edit) |
| | (SEQ ID NO: 3276) | |
| 3277 | TAAATTTTAAATACTCACATTTTTAAGTAAAC | RTT*4,9,11 (TG-to-TA PAM silencing edit) |
| | (SEQ ID NO: 3277) | |
| 3278 | TAAATTTTAAATACTCACATTTTTAAGTAGAC | RTT*5,10,11 (TG-to-TA PAM silencing edit) |
| | (SEQ ID NO: 3278) | |
| 3279 | ATAAATTTTAAATACTCACATTTTTAAGAAGAC | RTT*1,6,11 (TG-to-TT PAM silencing edit) |
| | (SEQ ID NO: 3279) | |
| 3280 | ATAAATTTTAAATACTCACATTTTTAAGCAAAC | RTT*2,7,11 |
| | (SEQ ID NO: 3280) | |
| 3281 | ATAAATTTTAAATACTCACATTTTTAAGGAGAC | RTT*3,8,11 (TG-to-TC PAM silencing edit) |
| | (SEQ ID NO: 3281) | |
| 3282 | ATAAATTTTAAATACTCACATTTTTAAGTAAAC | RTT*4,9,11 (TG-to-TA PAM silencing edit) |
| | (SEQ ID NO: 3282) | |
| 3283 | ATAAATTTTAAATACTCACATTTTTAAGTAGAC | RTT*5,10,11 (TG-to-TA PAM silencing edit) |
| | (SEQ ID NO: 3283) | |
| 3284 | GATAAATTTTAAATACTCACATTTTTAAGAAGAC | RTT*1,6,11 (TG-to-TT PAM silencing edit) |
| | (SEQ ID NO: 3284) | |
| 3285 | GATAAATTTTAAATACTCACATTTTTAAGCAAAC | RTT*2,7,11 |
| | (SEQ ID NO: 3285) | |
| 3286 | GATAAATTTTAAATACTCACATTTTTAAGGAGAC | RTT*3,8,11 (TG-to-TC PAM silencing edit) |
| | (SEQ ID NO: 3286) | |
| 3287 | GATAAATTTTAAATACTCACATTTTTAAGTAAAC | RTT*4,9,11 (TG-to-TA PAM silencing edit) |
| | (SEQ ID NO: 3287) | |
| 3288 | GATAAATTTTAAATACTCACATTTTTAAGTAGAC | RTT*5,10,11 (TG-to-TA PAM silencing edit) |
| | (SEQ ID NO: 3288) | |
| 3289 | TGATAAATTTTAAATACTCACATTTTTAAGAAGA | RTT*1,6,11 (TG-to-TT PAM silencing edit) |
| | C (SEQ ID NO: 3289) | |
| 3290 | TGATAAATTTTAAATACTCACATTTTTAAGCAAA | RTT*2,7,11 |
| | C (SEQ ID NO: 3290) | |
| 3291 | TGATAAATTTTAAATACTCACATTTTTAAGGAGA | RTT*3,8,11 (TG-to-TC PAM silencing edit) |
| | C (SEQ ID NO: 3291) | |
| 3292 | TGATAAATTTTAAATACTCACATTTTTAAGTAAA | RTT*4,9,11 (TG-to-TA PAM silencing edit) |
| | C (SEQ ID NO: 3292) | |
| 3293 | TGATAAATTTTAAATACTCACATTTTTAAGTAGA | RTT*5,10,11 (TG-to-TA PAM silencing edit) |
| | C (SEQ ID NO: 3293) | |
| 3294 | GTGATAAATTTTAAATACTCACATTTTTAAGAAG | RTT*1,6,11 (TG-to-TT PAM silencing edit) |
| | AC (SEQ ID NO: 3294) | |
| 3295 | GTGATAAATTTTAAATACTCACATTTTTAAGCAA | RTT*2,7,11 |
| | AC (SEQ ID NO: 3295) | |
| 3296 | GTGATAAATTTTAAATACTCACATTTTTAAGGAG | RTT*3,8,11 (TG-to-TC PAM silencing edit) |
| | AC (SEQ ID NO: 3296) | |
| 3297 | GTGATAAATTTTAAATACTCACATTTTTAAGTAA | RTT*4,9,11 (TG-to-TA PAM silencing edit) |
| | AC (SEQ ID NO: 3297) | |
| 3298 | GTGATAAATTTTAAATACTCACATTTTTAAGTAG | RTT*5,10,11 (TG-to-TA PAM silencing edit) |
| | AC (SEQ ID NO: 3298) | |
| 3299 | AGTGATAAATTTTAAATACTCACATTTTTAAGAA | RTT*1,6,11 (TG-to-TT PAM silencing edit) |
| | GAC (SEQ ID NO: 3299) | |
| 3300 | AGTGATAAATTTTAAATACTCACATTTTTAAGCA | RTT*2,7,11 |
| | AAC (SEQ ID NO: 3300) | |
| 3301 | AGTGATAAATTTTAAATACTCACATTTTTAAGGA | RTT*3,8,11 (TG-to-TC PAM silencing edit) |
| | GAC (SEQ ID NO: 3301) | |
| 3302 | AGTGATAAATTTTAAATACTCACATTTTTAAGTA | RTT*4,9,11 (TG-to-TA PAM silencing edit) |
| | AAC (SEQ ID NO: 3302) | |
| 3303 | AGTGATAAATTTTAAATACTCACATTTTTAAGTA | RTT*5,10,11 (TG-to-TA PAM silencing edit) |
| | GAC (SEQ ID NO: 3303) | |
| 3304 | AAGTGATAAATTTTAAATACTCACATTTTTAAGA | RTT*1,6,11 (TG-to-TT PAM silencing edit) |
| | AGAC (SEQ ID NO: 3304) | |
| 3305 | AAGTGATAAATTTTAAATACTCACATTTTTAAGC | RTT*2,7,11 |
| | AAAC (SEQ ID NO: 3305) | |
| 3306 | AAGTGATAAATTTTAAATACTCACATTTTTAAGG | RTT*3,8,11 (TG-to-TC PAM silencing edit) |
| | AGAC (SEQ ID NO: 3306) | |
| 3307 | AAGTGATAAATTTTAAATACTCACATTTTTAAGT | RTT*4,9,11 (TG-to-TA PAM silencing edit) |
| | AAAC (SEQ ID NO: 3307) | |
| 3308 | AAGTGATAAATTTTAAATACTCACATTTTTAAGT | RTT*5,10,11 (TG-to-TA PAM silencing edit) |
| | AGAC (SEQ ID NO: 3308) | |
| 3309 | AAAGTGATAAATTTTAAATACTCACATTTTTAAG | RTT*1,6,11 (TG-to-TT PAM silencing edit) |
| | AAGAC (SEQ ID NO: 3309) | |
| 3310 | AAAGTGATAAATTTTAAATACTCACATTTTTAAG | RTT*2,7,11 |
| | CAAAC (SEQ ID NO: 3310) | |
| 3311 | AAAGTGATAAATTTTAAATACTCACATTTTTAAG | RTT*3,8,11 (TG-to-TC PAM silencing edit) |
| | GAGAC (SEQ ID NO: 3311) | |
| 3312 | AAAGTGATAAATTTTAAATACTCACATTTTTAAG | RTT*4,9,11 (TG-to-TA PAM silencing edit) |
| | TAAAC (SEQ ID NO: 3312) | |
| 3313 | AAAGTGATAAATTTTAAATACTCACATTTTTAAG | RTT*5,10,11 (TG-to-TA PAM silencing edit) |
| | TAGAC (SEQ ID NO: 3313) | |
| 3314 | AAAAGTGATAAATTTTAAATACTCACATTTTTAA | RTT*1,6,11 (TG-to-TT PAM silencing edit) |
| | GAAGAC (SEQ ID NO: 3314) | |
| 3315 | AAAAGTGATAAATTTTAAATACTCACATTTTTAA | RTT*2,7,11 |
| | GCAAAC (SEQ ID NO: 3315) | |
| 3316 | AAAAGTGATAAATTTTAAATACTCACATTTTTAA | RTT*3,8,11 (TG-to-TC PAM silencing edit) |
| | GGAGAC (SEQ ID NO: 3316) | |
| 3317 | AAAAGTGATAAATTTTAAATACTCACATTTTTAA | RTT*4,9,11 (TG-to-TA PAM silencing edit) |
| | GTAAAC (SEQ ID NO: 3317) | |
| 3318 | AAAAGTGATAAATTTTAAATACTCACATTTTTAA | RTT*5,10,11 (TG-to-TA PAM silencing edit) |
| | GTAGAC (SEQ ID NO: 3318) | |
| 2885 | AAAAGTTAAACATCTCTTCT (SEQ ID NO: 2885) | PE3 ngRNA spacer (GG PAM) |
| 2559 | AAACATCTCTTCTGGAGGAC (SEQ ID NO: 2559) | PE3 ngRNA spacer (TG PAM) |
| 2886 | AAGTTAAACATCTCTTCTGG (SEQ ID NO: 2886) | PE3 ngRNA spacer (AG PAM) |
| 2573 | AGCATTAAACATTTCAAAAG (SEQ ID NO: 2573) | PE3 ngRNA spacer (TG PAM) |
| 2887 | AGTTAAACATCTCTTCTGGA (SEQ ID NO: 2887) | PE3 ngRNA spacer (GG PAM) |
| 2888 | ATATTTCCATTTACTCTTTT (SEQ ID NO: 2888) | PE3 ngRNA spacer (TG PAM) |
| 2889 | CATTTACTCTTTTTGCTGAT (SEQ ID NO: 2889) | PE3 ngRNA spacer (GG PAM) |
| 2890 | CCATTTACTCTTTTTGCTGA (SEQ ID NO: 2890) | PE3 ngRNA spacer (TG PAM) |
| 3319 | CTCACATTTTTAAGAAGACC (SEQ ID NO: 3319) | PE3b*1 ngRNA spacer (AG PAM) |
| 2891 | CTCACATTTTTAAGCAAACC (SEQ ID NO: 2891) | PE3b*2 ngRNA spacer (AG PAM) |
| 3320 | CTCACATTTTTAAGGAGACC (SEQ ID NO: 3320) | PE3b*3 ngRNA spacer (AG PAM) |
| 3321 | CTCACATTTTTAAGTAAACC (SEQ ID NO: 3321) | PE3b*4 ngRNA spacer (AG PAM) |
| 3322 | CTCACATTTTTAAGTAGACC (SEQ ID NO: 3322) | PE3b*5 ngRNA spacer (AG PAM) |
| 2892 | GAAAAGTTAAACATCTCTTC (SEQ ID NO: 2892) | PE3 ngRNA spacer (TG PAM) |
| 3323 | TCACATTTTTAAGAAGACCA (SEQ ID NO: 3323) | PE3b*6 ngRNA spacer (GG PAM) |
| 2893 | TCACATTTTTAAGCAAACCA (SEQ ID NO: 2893) | PE3b*7 ngRNA spacer (GG PAM) |
| 3324 | TCACATTTTTAAGGAGACCA (SEQ ID NO: 3324) | PE3b*8 ngRNA spacer (GG PAM) |
| 3325 | TCACATTTTTAAGTAAACCA (SEQ ID NO: 3325) | PE3b*9 ngRNA spacer (GG PAM) |
| 3326 | TCACATTTTTAAGTAGACCA (SEQ ID NO: 3326) | PE3b*10 ngRNA spacer (GG PAM) |
| 2569 | TCAGCATTAAACATTTCAAA (SEQ ID NO: 2569) | PE3 ngRNA spacer (AG PAM) |
| 2894 | TTTAAATACTCACATTTTTA (SEQ ID NO: 2894) | PE3b*11 ngRNA spacer (AG PAM) |
| 2895 | TTTCCATTTACTCTTTTTGC (SEQ ID NO: 2895) | PE3 ngRNA spacer (TG PAM) |
| 2896 | TTTTTGCTGATGGCACATTC (SEQ ID NO: 2896) | PE3 ngRNA spacer (AG PAM) |
| 2897 | AAGTTAAACATCTCTTCTGGGTTTTAGAGCTAGA | PE3 ngRNA (AG PAM) |
| | AATAGCAAGTTAAAATAAGGCTAGTCCGTTATCA | |
| | ACTTGAAAAAGTGGCACCGAGTCGGTGC (SEQ ID | |
| | NO: 2897) | |
| 2898 | GAAAAGTTAAACATCTCTTCGTTTTAGAGCTAGA | PE3 ngRNA (TG PAM) |
| | AATAGCAAGTTAAAATAAGGCTAGTCCGTTATCA | |
| | ACTTGAAAAAGTGGCACCGAGTCGGTGC (SEQ ID | |
| | NO: 2898) | |
| 2899 | AAGTTAAACATCTCTTCTGGGTTTTAGAGCTAGA | PE3 ngRNA (AG PAM), contains end |
| | AATAGCAAGTTAAAATAAGGCTAGTCCGTTATCA | adaptations |
| | ACTTGAAAAAGTGGCACCGAGTCGGTGCTTTT | |
| | (SEQ ID NO: 2899) | |
| 2900 | GAAAAGTTAAACATCTCTTCGTTTTAGAGCTAGA | PE3 ngRNA (TG PAM), contains end |
| | AATAGCAAGTTAAAATAAGGCTAGTCCGTTATCA | adaptations |
| | ACTTGAAAAAGTGGCACCGAGTCGGTGCTTTT | |
| | (SEQ ID NO: 2900) | |

TABLE 48

| Sequence | | |
|---|---|---|
| Number | Sequence | Description |
| 3327 | CCTGGTTTGCTTAAAAA (SEQ ID NO: 3327) | PEgRNA spacer (TG PAM) |
| 3328 | TCCTGGTTTGCTTAAAAA (SEQ ID NO: 3328) | PEgRNA spacer (TG PAM) |
| 3329 | ATCCTGGTTTGCTTAAAAA (SEQ ID NO: 3329) | PEgRNA spacer (TG PAM) |
| 2625 | TATCCTGGTTTGCTTAAAAA (SEQ ID NO: 2625) | PEgRNA spacer (TG PAM) |
| 3330 | CTATCCTGGTTTGCTTAAAAA (SEQ ID NO: 3330) | PEgRNA spacer (TG PAM) |
| 3331 | ACTATCCTGGTTTGCTTAAAAA (SEQ ID NO: 3331) | PEgRNA spacer (TG PAM) |
| 3332 | TTAAG | PBS |
| 3333 | TTAAGC | PBS |
| 3334 | TTAAGCA | PBS |
| 3335 | TTAAGCAA | PBS |
| 3336 | TTAAGCAAA | PBS |
| 3337 | TTAAGCAAAC (SEQ ID NO: 3337) | PBS |
| 3338 | TTAAGCAAACC (SEQ ID NO: 3338) | PBS |
| 3339 | TTAAGCAAACCA (SEQ ID NO: 3339) | PBS |
| 3340 | TTAAGCAAACCAG (SEQ ID NO: 3340) | PBS |
| 3341 | TTAAGCAAACCAGG (SEQ ID NO: 3341) | PBS |
| 3342 | TTAAGCAAACCAGGA (SEQ ID NO: 3342) | PBS |
| 3343 | TTAAGCAAACCAGGAT (SEQ ID NO: 3343) | PBS |
| 3344 | TTAAGCAAACCAGGATA (SEQ ID NO: 3344) | PBS |
| 3345 | TTAAGCAAACCAGGATAG (SEQ ID NO: 3345) | PBS |
| 3346 | TTAAGCAAACCAGGATAGT (SEQ ID NO: 3346) | PBS |
| 3347 | ACTCACATTT (SEQ ID NO: 3347) | RTT |
| 3348 | TACTCACATTT (SEQ ID NO: 3348) | RTT |
| 3349 | ATACTCACATTT (SEQ ID NO: 3349) | RTT |
| 3350 | AATACTCACATTT (SEQ ID NO: 3350) | RTT |
| 3351 | AAATACTCACATTT (SEQ ID NO: 3351) | RTT |
| 3352 | TAAATACTCACATTT (SEQ ID NO: 3352) | RTT |
| 3353 | TTAAATACTCACATTT (SEQ ID NO: 3353) | RTT |
| 3354 | TTTAAATACTCACATTT (SEQ ID NO: 3354) | RTT |
| 3355 | TTTTAAATACTCACATTT (SEQ ID NO: 3355) | RTT |
| 3356 | ATTTTAAATACTCACATTT (SEQ ID NO: 3356) | RTT |
| 3357 | AATTTTAAATACTCACATTT (SEQ ID NO: 3357) | RTT |
| 3358 | AAATTTTAAATACTCACATTT (SEQ ID NO: 3358) | RTT |
| 3359 | TAAATTTTAAATACTCACATTT (SEQ ID NO: 3359) | RTT |
| 3360 | ATAAATTTTAAATACTCACATTT (SEQ ID NO: | RTT |
| | 3360) | |
| 3361 | GATAAATTTTAAATACTCACATTT (SEQ ID NO: | RTT |
| | 3361) | |
| 3362 | TGATAAATTTTAAATACTCACATTT (SEQ ID NO: | RTT |
| | 3362) | |
| 3363 | GTGATAAATTTTAAATACTCACATTT (SEQ ID NO: | RTT |
| | 3363) | |
| 3364 | AGTGATAAATTTTAAATACTCACATTT (SEQ ID | RTT |
| | NO: 3364) | |
| 3365 | AAGTGATAAATTTTAAATACTCACATTT (SEQ ID | RTT |
| | NO: 3365) | |
| 3366 | AAAGTGATAAATTTTAAATACTCACATTT (SEQ | RTT |
| | ID NO: 3366) | |
| 3367 | AAAAGTGATAAATTTTAAATACTCACATTT (SEQ | RTT |
| | ID NO: 3367) | |
| 3368 | CAAAAGTGATAAATTTTAAATACTCACATTT | RTT |
| | (SEQ ID NO: 3368) | |
| 3369 | TCAAAAGTGATAAATTTTAAATACTCACATTT | RTT |
| | (SEQ ID NO: 3369) | |
| 3370 | TTCAAAAGTGATAAATTTTAAATACTCACATTT | RTT |
| | (SEQ ID NO: 3370) | |
| 3371 | TTTCAAAAGTGATAAATTTTAAATACTCACATTT | RTT |
| | (SEQ ID NO: 3371) | |
| 3372 | ATTTCAAAAGTGATAAATTTTAAATACTCACATT | RTT |
| | T (SEQ ID NO: 3372) | |
| 3373 | CATTTCAAAAGTGATAAATTTTAAATACTCACAT | RTT |
| | TT (SEQ ID NO: 3373) | |
| 3374 | ACATTTCAAAAGTGATAAATTTTAAATACTCACA | RTT |
| | TTT (SEQ ID NO: 3374) | |
| 3375 | AACATTTCAAAAGTGATAAATTTTAAATACTCAC | RTT |
| | ATTT (SEQ ID NO: 3375) | |
| 3376 | AAACATTTCAAAAGTGATAAATTTTAAATACTCA | RTT |
| | CATTT (SEQ ID NO: 3376) | |
| 3377 | TAAACATTTCAAAAGTGATAAATTTTAAATACTC | RTT |
| | ACATTT (SEQ ID NO: 3377) | |
| 2885 | AAAAGTTAAACATCTCTTCT (SEQ ID NO: 2885) | PE3 ngRNA spacer (GG PAM) |
| 2559 | AAACATCTCTTCTGGAGGAC (SEQ ID NO: 2559) | PE3 ngRNA spacer (TG PAM) |
| 2886 | AAGTTAAACATCTCTTCTGG (SEQ ID NO: 2886) | PE3 ngRNA spacer (AG PAM) |
| 3084 | AGAAGAGATAAACAAAGAAA (SEQ ID NO: 3084) | PE3 ngRNA spacer (AG PAM) |
| 2573 | AGCATTAAACATTTCAAAAG (SEQ ID NO: 2573) | PE3 ngRNA spacer (TG PAM) |
| 3085 | AGGTAAGAAGAGATAAACAA (SEQ ID NO: 3085) | PE3 ngRNA spacer (AG PAM) |
| 2887 | AGTTAAACATCTCTTCTGGA (SEQ ID NO: 2887) | PE3 ngRNA spacer (GG PAM) |
| 2888 | ATATTTCCATTTACTCTTTT (SEQ ID NO: 2888) | PE3 ngRNA spacer (TG PAM) |
| 2889 | CATTTACTCTTTTTGCTGAT (SEQ ID NO: 2889) | PE3 ngRNA spacer (GG PAM) |
| 2890 | CCATTTACTCTTTTTGCTGA (SEQ ID NO: 2890) | PE3 ngRNA spacer (TG PAM) |
| 2892 | GAAAAGTTAAACATCTCTTC (SEQ ID NO: 2892) | PE3 ngRNA spacer (TG PAM) |
| 2569 | TCAGCATTAAACATTTCAAA (SEQ ID NO: 2569) | PE3 ngRNA spacer (AG PAM) |
| 2894 | TTTAAATACTCACATTTTTA (SEQ ID NO: 2894) | PE3b ngRNA spacer (AG PAM) |
| 2895 | TTTCCATTTACTCTTTTTGC (SEQ ID NO: 2895) | PE3 ngRNA spacer (TG PAM) |
| 2896 | TTTTTGCTGATGGCACATTC (SEQ ID NO: 2896) | PE3 ngRNA spacer (AG PAM) |
| 2897 | AAGTTAAACATCTCTTCTGGGTTTTAGAGCTAGA | PE3 ngRNA (AG PAM) |
| | AATAGCAAGTTAAAATAAGGCTAGTCCGTTATCA | |
| | ACTTGAAAAAGTGGCACCGAGTCGGTGC (SEQ ID | |
| | NO: 2897) | |
| 2898 | GAAAAGTTAAACATCTCTTCGTTTTAGAGCTAGA | PE3 ngRNA (TG PAM) |
| | AATAGCAAGTTAAAATAAGGCTAGTCCGTTATCA | |
| | ACTTGAAAAAGTGGCACCGAGTCGGTGC (SEQ ID | |
| | NO: 2898) | |
| 2899 | AAGTTAAACATCTCTTCTGGGTTTTAGAGCTAGA | PE3 ngRNA (AG PAM), contains end |
| | AATAGCAAGTTAAAATAAGGCTAGTCCGTTATCA | adaptations |
| | ACTTGAAAAAGTGGCACCGAGTCGGTGCTTTT | |
| | (SEQ ID NO: 2899) | |
| 2900 | GAAAAGTTAAACATCTCTTCGTTTTAGAGCTAGA | PE3 ngRNA (TG PAM), contains end |
| | AATAGCAAGTTAAAATAAGGCTAGTCCGTTATCA | adaptations |
| | ACTTGAAAAAGTGGCACCGAGTCGGTGCTTTT | |
| | (SEQ ID NO: 2900) | |

TABLE 49

| Sequence | | |
|---|---|---|
| Number | Sequence | Description |
| 3378 | GCATTAAACATTTCAAA (SEQ ID NO: 3378) | PEgRNA spacer (AG;AGTGAT PAM) |
| 3379 | AGCATTAAACATTTCAAA (SEQ ID NO: 3379) | PEgRNA spacer (AG;AGTGAT PAM) |
| 3380 | CAGCATTAAACATTTCAAA (SEQ ID NO: 3380) | PEgRNA spacer (AG;AGTGAT PAM) |
| 2569 | TCAGCATTAAACATTTCAAA (SEQ ID NO: 2569) | PEgRNA spacer (AG;AGTGAT PAM) |
| 3381 | TTCAGCATTAAACATTTCAAA (SEQ ID NO: 3381) | PEgRNA spacer (AG;AGTGAT PAM) |
| 3382 | ATTCAGCATTAAACATTTCAAA (SEQ ID NO: 3382) | PEgRNA spacer (AG;AGTGAT PAM) |
| 3383 | GAAAT | PBS |
| 3384 | GAAATG | PBS |
| 3385 | GAAATGT | PBS |
| 3386 | GAAATGTT | PBS |
| 3387 | GAAATGTTT | PBS |
| 3388 | GAAATGTTTA (SEQ ID NO: 3388) | PBS |
| 3389 | GAAATGTTTAA (SEQ ID NO: 3389) | PBS |
| 3390 | GAAATGTTTAAT (SEQ ID NO: 3390) | PBS |
| 3391 | GAAATGTTTAATG (SEQ ID NO: 3391) | PBS |
| 3392 | GAAATGTTTAATGC (SEQ ID NO: 3392) | PBS |
| 3393 | GAAATGTTTAATGCT (SEQ ID NO: 3393) | PBS |
| 3394 | GAAATGTTTAATGCTG (SEQ ID NO: 3394) | PBS |
| 3395 | GAAATGTTTAATGCTGA (SEQ ID NO: 3395) | PBS |
| 3396 | GAAATGTTTAATGCTGAA (SEQ ID NO: 3396) | PBS |
| 3397 | GAAATGTTTAATGCTGAAT (SEQ ID NO: 3397) | PBS |
| 3398 | AGTATTTAAAATTTATCACTTTT (SEQ ID NO: | RTT |
| | 3398) | |
| 3399 | GAGTATTTAAAATTTATCACTTTT (SEQ ID NO: | RTT |
| | 3399) | |
| 3400 | TGAGTATTTAAAATTTATCACTTTT (SEQ ID NO: | RTT |
| | 3400) | |
| 3401 | GTGAGTATTTAAAATTTATCACTTTT (SEQ ID NO: | RTT |
| | 3401) | |
| 3402 | TGTGAGTATTTAAAATTTATCACTTTT (SEQ ID | RTT |
| | NO: 3402) | |
| 3403 | ATGTGAGTATTTAAAATTTATCACTTTT (SEQ ID | RTT |
| | NO: 3403) | |
| 3404 | AATGTGAGTATTTAAAATTTATCACTTTT (SEQ ID | RTT |
| | NO: 3404) | |
| 3405 | AAATGTGAGTATTTAAAATTTATCACTTTT (SEQ | RTT |
| | ID NO: 3405) | |
| 3406 | AAAATGTGAGTATTTAAAATTTATCACTTTT (SEQ | RTT |
| | ID NO: 3406) | |
| 3407 | AAAAATGTGAGTATTTAAAATTTATCACTTTT | RTT |
| | (SEQ ID NO: 3407) | |
| 3408 | TAAAAATGTGAGTATTTAAAATTTATCACTTTT | RTT |
| | (SEQ ID NO: 3408) | |
| 3409 | TTAAAAATGTGAGTATTTAAAATTTATCACTTTT | RTT |
| | (SEQ ID NO: 3409) | |
| 3410 | CTTAAAAATGTGAGTATTTAAAATTTATCACTTT | RTT |
| | T (SEQ ID NO: 3410) | |
| 3411 | GCTTAAAAATGTGAGTATTTAAAATTTATCACTT | RTT |
| | TT (SEQ ID NO: 3411) | |
| 3412 | TGCTTAAAAATGTGAGTATTTAAAATTTATCACT | RTT |
| | TTT (SEQ ID NO: 3412) | |
| 3413 | TTGCTTAAAAATGTGAGTATTTAAAATTTATCAC | RTT |
| | TTTT (SEQ ID NO: 3413) | |
| 3414 | TTTGCTTAAAAATGTGAGTATTTAAAATTTATCA | RTT |
| | CTTTT (SEQ ID NO: 3414) | |
| 3415 | GTTTGCTTAAAAATGTGAGTATTTAAAATTTATC | RTT |
| | ACTTTT (SEQ ID NO: 3415) | |
| 2943 | AAGAAGTTGCTCTTTTCACT (SEQ ID NO: 2943) | PE3 ngRNA spacer (CAAGGT PAM) |
| 2533 | AAGGTCTTGGGTATGCACCT (SEQ ID NO: 2533) | PE3 ngRNA spacer (ATAGAT PAM) |
| 2611 | AAGTTGCTCTTTTCACTCAA (SEQ ID NO: 2611) | PE3 ngRNA spacer (GG PAM) |
| 2612 | ATACTTTCAGCACTCAGATT (SEQ ID NO: 2612) | PE3 ngRNA spacer (TG PAM) |
| 2944 | ATATACTTTCAGCACTCAGA (SEQ ID NO: 2944) | PE3 ngRNA spacer (TTTGAT PAM) |
| 2945 | ATCTCATATACTTTCAGCAC (SEQ ID NO: 2945) | PE3 ngRNA spacer (TCAGAT PAM) |
| 2677 | ATGCACCTATAGATTACTAT (SEQ ID NO: 2677) | PE3 ngRNA spacer (CCTGGT PAM) |
| 2771 | ATTACTATCCTGGTTTGCTT (SEQ ID NO: 2771) | PE3 ngRNA spacer (AAAAAT PAM) |
| 2613 | CACCTATAGATTACTATCCT (SEQ ID NO: 2613) | PE3 ngRNA spacer (GG PAM) |
| 2614 | CTCAGATTTGATAAAGAAGT (SEQ ID NO: 2614) | PE3 ngRNA spacer (TG PAM) |
| 2615 | CTCATATACTTTCAGCACTC (SEQ ID NO: 2615) | PE3 ngRNA spacer (AG PAM) |
| 2616 | CTCTTTTCACTCAAGGTCTT (SEQ ID NO: 2616) | PE3 ngRNA spacer (GG PAM) |
| 2617 | CTGGTTTGCTTAAAAATGTG (SEQ ID NO: 2617) | PE3 ngRNA spacer (TG PAM) |
| 2618 | GAAGTTGCTCTTTTCACTCA (SEQ ID NO: 2618) | PE3 ngRNA spacer (AG PAM) |
| 2619 | GCACCTATAGATTACTATCC (SEQ ID NO: 2619) | PE3 ngRNA spacer (TG PAM) |
| 2620 | GCACTCAGATTTGATAAAGA (SEQ ID NO: 2620) | PE3 ngRNA spacer (AG PAM) |
| 2621 | GCTCTTTTCACTCAAGGTCT (SEQ ID NO: 2621) | PE3 ngRNA spacer (TG PAM) |
| 2622 | GGTCTTGGGTATGCACCTAT (SEQ ID NO: 2622) | PE3 ngRNA spacer (AG PAM) |
| 2623 | GTATTATCTCATATACTTTC (SEQ ID NO: 2623) | PE3 ngRNA spacer (AG PAM) |
| 2624 | TATAGATTACTATCCTGGTT (SEQ ID NO: 2624) | PE3 ngRNA spacer (TG PAM) |
| 2625 | TATCCTGGTTTGCTTAAAAA (SEQ ID NO: 2625) | PE3 ngRNA spacer (TG PAM) |
| 2626 | TATTTAAAATTTATCACTTT (SEQ ID NO: 2626) | PE3 ngRNA spacer (TG;TGAAAT PAM) |
| 2627 | TCAGCACTCAGATTTGATAA (SEQ ID NO: 2627) | PE3 ngRNA spacer (AG;AGAAGT PAM) |
| 2628 | TCCTGGTTTGCTTAAAAATG (SEQ ID NO: 2628) | PE3 ngRNA spacer (TG PAM) |
| 2629 | TCTTTTCACTCAAGGTCTTG (SEQ ID NO: 2629) | PE3 ngRNA spacer (GG PAM) |
| 2946 | TGCTCTTTTCACTCAAGGTC (SEQ ID NO: 2946) | PE3 ngRNA spacer (TTGGGT PAM) |
| 2947 | TGCTTAAAAATGTGAGTATT (SEQ ID NO: 2947) | PE3b ngRNA spacer (TAAAAT PAM) |
| 2630 | TTCACTCAAGGTCTTGGGTA (SEQ ID NO: 2630) | PE3 ngRNA spacer (TG PAM) |

TABLE 50

| Sequence | | |
|---|---|---|
| Number | Sequence | Description |
| 3416 | TGGTTTGCTTAAAAATG (SEQ ID NO: 3416) | PEgRNA spacer (TG PAM) |
| 3417 | CTGGTTTGCTTAAAAATG (SEQ ID NO: 3417) | PEgRNA spacer (TG PAM) |
| 3418 | CCTGGTTTGCTTAAAAATG (SEQ ID NO: 3418) | PEgRNA spacer (TG PAM) |
| 2628 | TCCTGGTTTGCTTAAAAATG (SEQ ID NO: 2628) | PEgRNA spacer (TG PAM) |
| 3419 | ATCCTGGTTTGCTTAAAAATG (SEQ ID NO: 3419) | PEgRNA spacer (TG PAM) |
| 3420 | TATCCTGGTTTGCTTAAAAATG (SEQ ID NO: 3420) | PEgRNA spacer (TG PAM) |
| 3421 | TTTTA | PBS |
| 3422 | TTTTAA | PBS |
| 3423 | TTTTAAG | PBS |
| 3424 | TTTTAAGC | PBS |
| 3425 | TTTTAAGCA | PBS |
| 3426 | TTTTAAGCAA (SEQ ID NO: 3426) | PBS |
| 3427 | TTTTAAGCAAA (SEQ ID NO: 3427) | PBS |
| 3428 | TTTTAAGCAAAC (SEQ ID NO: 3428) | PBS |
| 3429 | TTTTAAGCAAACC (SEQ ID NO: 3429) | PBS |
| 3430 | TTTTAAGCAAACCA (SEQ ID NO: 3430) | PBS |
| 3431 | TTTTAAGCAAACCAG (SEQ ID NO: 3431) | PBS |
| 3432 | TTTTAAGCAAACCAGG (SEQ ID NO: 3432) | PBS |
| 3433 | TTTTAAGCAAACCAGGA (SEQ ID NO: 3433) | PBS |
| 3434 | TTTTAAGCAAACCAGGAT (SEQ ID NO: 3434) | PBS |
| 3435 | TTTTAAGCAAACCAGGATA (SEQ ID NO: 3435) | PBS |
| 3436 | ATACTCACAT (SEQ ID NO: 3436) | RTT |
| 3437 | AATACTCACAT (SEQ ID NO: 3437) | RTT |
| 3438 | AAATACTCACAT (SEQ ID NO: 3438) | RTT |
| 3439 | TAAATACTCACAT (SEQ ID NO: 3439) | RTT |
| 3440 | TTAAATACTCACAT (SEQ ID NO: 3440) | RTT |
| 3441 | TTTAAATACTCACAT (SEQ ID NO: 3441) | RTT |
| 3442 | TTTTAAATACTCACAT (SEQ ID NO: 3442) | RTT |
| 3443 | ATTTTAAATACTCACAT (SEQ ID NO: 3443) | RTT |
| 3444 | AATTTTAAATACTCACAT (SEQ ID NO: 3444) | RTT |
| 3445 | AAATTTTAAATACTCACAT (SEQ ID NO: 3445) | RTT |
| 3446 | TAAATTTTAAATACTCACAT (SEQ ID NO: 3446) | RTT |
| 3447 | ATAAATTTTAAATACTCACAT (SEQ ID NO: 3447) | RTT |
| 3448 | GATAAATTTTAAATACTCACAT (SEQ ID NO: 3448) | RTT |
| 3449 | TGATAAATTTTAAATACTCACAT (SEQ ID NO: | RTT |
| | 3449) | |
| 3450 | GTGATAAATTTTAAATACTCACAT (SEQ ID NO: | RTT |
| | 3450) | |
| 3451 | AGTGATAAATTTTAAATACTCACAT (SEQ ID NO: | RTT |
| | 3451) | |
| 3452 | AAGTGATAAATTTTAAATACTCACAT (SEQ ID | RTT |
| | NO: 3452) | |
| 3453 | AAAGTGATAAATTTTAAATACTCACAT (SEQ ID | RTT |
| | NO: 3453) | |
| 3454 | AAAAGTGATAAATTTTAAATACTCACAT (SEQ ID | RTT |
| | NO: 3454) | |
| 3455 | CAAAAGTGATAAATTTTAAATACTCACAT (SEQ | RTT |
| | ID NO: 3455 | |
| 3456 | TCAAAAGTGATAAATTTTAAATACTCACAT (SEQ | RTT |
| | ID NO: 3456) | |
| 3457 | TTCAAAAGTGATAAATTTTAAATACTCACAT | RTT |
| | (SEQ ID NO: 3457) | |
| 3458 | TTTCAAAAGTGATAAATTTTAAATACTCACAT | RTT |
| | (SEQ ID NO: 3458) | |
| 3459 | ATTTCAAAAGTGATAAATTTTAAATACTCACAT | RTT |
| | (SEQ ID NO: 3459) | |
| 3460 | CATTTCAAAAGTGATAAATTTTAAATACTCACAT | RTT |
| | (SEQ ID NO: 3460) | |
| 3461 | ACATTTCAAAAGTGATAAATTTTAAATACTCACA | RTT |
| | T (SEQ ID NO: 3461) | |
| 3462 | AACATTTCAAAAGTGATAAATTTTAAATACTCAC | RTT |
| | AT (SEQ ID NO: 3462) | |
| 3463 | AAACATTTCAAAAGTGATAAATTTTAAATACTCA | RTT |
| | CAT (SEQ ID NO: 3463) | |
| 3464 | TAAACATTTCAAAAGTGATAAATTTTAAATACTC | RTT |
| | ACAT (SEQ ID NO: 3464) | |
| 3465 | TTAAACATTTCAAAAGTGATAAATTTTAAATACT | RTT |
| | CACAT (SEQ ID NO: 3465) | |
| 3466 | ATTAAACATTTCAAAAGTGATAAATTTTAAATAC | RTT |
| | TCACAT (SEQ ID NO: 3466) | |
| 2885 | AAAAGTTAAACATCTCTTCT (SEQ ID NO: 2885) | PE3 ngRNA spacer (GG PAM) |
| 2559 | AAACATCTCTTCTGGAGGAC (SEQ ID NO: 2559) | PE3 ngRNA spacer (TG PAM) |
| 2886 | AAGTTAAACATCTCTTCTGG (SEQ ID NO: 2886) | PE3 ngRNA spacer (AG PAM) |
| 3084 | AGAAGAGATAAACAAAGAAA (SEQ ID NO: 3084) | PE3 ngRNA spacer (AG PAM) |
| 2573 | AGCATTAAACATTTCAAAAG (SEQ ID NO: 2573) | PE3 ngRNA spacer (TG PAM) |
| 3085 | AGGTAAGAAGAGATAAACAA (SEQ ID NO: 3085) | PE3 ngRNA spacer (AG PAM) |
| 2887 | AGTTAAACATCTCTTCTGGA (SEQ ID NO: 2887) | PE3 ngRNA spacer (GG PAM) |
| 2888 | ATATTTCCATTTACTCTTTT (SEQ ID NO: 2888) | PE3 ngRNA spacer (TG PAM) |
| 2889 | CATTTACTCTTTTTGCTGAT (SEQ ID NO: 2889) | PE3 ngRNA spacer (GG PAM) |
| 2890 | CCATTTACTCTTTTTGCTGA (SEQ ID NO: 2890) | PE3 ngRNA spacer (TG PAM) |
| 2892 | GAAAAGTTAAACATCTCTTC (SEQ ID NO: 2892) | PE3 ngRNA spacer (TG PAM) |
| 2569 | TCAGCATTAAACATTTCAAA (SEQ ID NO: 2569) | PE3 ngRNA spacer (AG PAM) |
| 2895 | TTTCCATTTACTCTTTTTGC (SEQ ID NO: 2895) | PE3 ngRNA spacer (TG PAM) |
| 2896 | TTTTTGCTGATGGCACATTC (SEQ ID NO: 2896) | PE3 ngRNA spacer (AG PAM) |
| 2897 | AAGTTAAACATCTCTTCTGGGTTTTAGAGCTAGA | PE3 ngRNA (AG PAM) |
| | AATAGCAAGTTAAAATAAGGCTAGTCCGTTATCA | |
| | ACTTGAAAAAGTGGCACCGAGTCGGTGC (SEQ ID | |
| | NO: 2897) | |
| 2898 | GAAAAGTTAAACATCTCTTCGTTTTAGAGCTAGA | PE3 ngRNA (TG PAM) |
| | AATAGCAAGTTAAAATAAGGCTAGTCCGTTATCA | |
| | ACTTGAAAAAGTGGCACCGAGTCGGTGC (SEQ ID | |
| | NO: 2898) | |
| 2899 | AAGTTAAACATCTCTTCTGGGTTTTAGAGCTAGA | PE3 ngRNA (AG PAM), contains end |
| | AATAGCAAGTTAAAATAAGGCTAGTCCGTTATCA | adaptations |
| | ACTTGAAAAAGTGGCACCGAGTCGGTGCTTTT | |
| | (SEQ ID NO: 2899) | |
| 2900 | GAAAAGTTAAACATCTCTTCGTTTTAGAGCTAGA | PE3 ngRNA (TG PAM), contains end |
| | AATAGCAAGTTAAAATAAGGCTAGTCCGTTATCA | adaptations |
| | ACTTGAAAAAGTGGCACCGAGTCGGTGCTTTT | |
| | (SEQ ID NO: 2900) | |

TABLE 51

| Sequence | | |
|---|---|---|
| Number | Sequence | Description |
| 3467 | ACCTATAGATTACTATC (SEQ ID NO: 3467) | PEgRNA spacer (CTGG PAM) |
| 3468 | CACCTATAGATTACTATC (SEQ ID NO: 3468) | PEgRNA spacer (CTGG PAM) |
| 3469 | GCACCTATAGATTACTATC (SEQ ID NO: 3469) | PEgRNA spacer (CTGG PAM) |
| 3470 | TGCACCTATAGATTACTATC (SEQ ID NO: 3470) | PEgRNA spacer (CTGG PAM) |
| 3471 | ATGCACCTATAGATTACTATC (SEQ ID NO: 3471) | PEgRNA spacer (CTGG PAM) |
| 3472 | TATGCACCTATAGATTACTATC (SEQ ID NO: 3472) | PEgRNA spacer (CTGG PAM) |
| 3473 | AGTAA | PBS |
| 3474 | AGTAAT | PBS |
| 3475 | AGTAATC | PBS |
| 3476 | AGTAATCT | PBS |
| 3477 | AGTAATCTA | PBS |
| 3478 | AGTAATCTAT (SEQ ID NO: 3478) | PBS |
| 3479 | AGTAATCTATA (SEQ ID NO: 3479) | PBS |
| 3480 | AGTAATCTATAG (SEQ ID NO: 3480) | PBS |
| 3481 | AGTAATCTATAGG (SEQ ID NO: 3481) | PBS |
| 3482 | AGTAATCTATAGGT (SEQ ID NO: 3482) | PBS |
| 3483 | AGTAATCTATAGGTG (SEQ ID NO: 3483) | PBS |
| 3484 | AGTAATCTATAGGTGC (SEQ ID NO: 3484) | PBS |
| 3485 | AGTAATCTATAGGTGCA (SEQ ID NO: 3485) | PBS |
| 3486 | AGTAATCTATAGGTGCAT (SEQ ID NO: 3486) | PBS |
| 3487 | AGTAATCTATAGGTGCATA (SEQ ID NO: 3487) | PBS |
| 3488 | TCACATTTTTAAGCAAACCAGGAT (SEQ ID NO: | RTT |
| | 3488) | |
| 3489 | CTCACATTTTTAAGCAAACCAGGAT (SEQ ID NO: | RTT |
| | 3489) | |
| 3490 | ACTCACATTTTTAAGCAAACCAGGAT (SEQ ID | RTT |
| | NO: 3490) | |
| 3491 | TACTCACATTTTTAAGCAAACCAGGAT (SEQ ID | RTT |
| | NO: 3491) | |
| 3492 | ATACTCACATTTTTAAGCAAACCAGGAT (SEQ ID | RTT |
| | NO: 3492) | |
| 3493 | AATACTCACATTTTTAAGCAAACCAGGAT (SEQ | RTT |
| | ID NO: 3493) | |
| 3494 | AAATACTCACATTTTTAAGCAAACCAGGAT (SEQ | RTT |
| | ID NO: 3494) | |
| 3495 | TAAATACTCACATTTTTAAGCAAACCAGGAT | RTT |
| | (SEQ ID NO: 3495) | |
| 3496 | TTAAATACTCACATTTTTAAGCAAACCAGGAT | RTT |
| | (SEQ ID NO: 3496) | |
| 3497 | TTTAAATACTCACATTTTTAAGCAAACCAGGAT | RTT |
| | (SEQ ID NO: 3497) | |
| 3498 | TTTTAAATACTCACATTTTTAAGCAAACCAGGAT | RTT |
| | (SEQ ID NO: 3498) | |
| 3499 | ATTTTAAATACTCACATTTTTAAGCAAACCAGGA | RTT |
| | T (SEQ ID NO: 3499) | |
| 3500 | AATTTTAAATACTCACATTTTTAAGCAAACCAGG | RTT |
| | AT (SEQ ID NO: 3500) | |
| 3501 | AAATTTTAAATACTCACATTTTTAAGCAAACCAG | RTT |
| | GAT (SEQ ID NO: 3501) | |
| 3502 | TAAATTTTAAATACTCACATTTTTAAGCAAACCA | RTT |
| | GGAT (SEQ ID NO: 3502) | |
| 3503 | ATAAATTTTAAATACTCACATTTTTAAGCAAACC | RTT |
| | AGGAT (SEQ ID NO: 3503) | |
| 3504 | GATAAATTTTAAATACTCACATTTTTAAGCAAAC | RTT |
| | CAGGAT (SEQ ID NO: 3504) | |
| 3505 | AAAGTTAAACATCTCTTCTG (SEQ ID NO: 3505) | PE3 ngRNA spacer (GAGG PAM) |
| 2560 | ACTCACATTTTTAAGCAAAC (SEQ ID NO: 2560) | PE3b ngRNA spacer (CAGG PAM) |
| 3506 | AGAAAAGTTAAACATCTCTT (SEQ ID NO: 3506) | PE3 ngRNA spacer (CTGG PAM) |
| 3507 | TCCATTTACTCTTTTTGCTG (SEQ ID NO: 3507) | PE3 ngRNA spacer (ATGG PAM) |

TABLE 52

| Sequence | | |
|---|---|---|
| Number | Sequence | Description |
| 3508 | AGCATTAAACATTTCAA (SEQ ID NO: 3508) | PEgRNA spacer (AAG PAM) |
| 3509 | CAGCATTAAACATTTCAA (SEQ ID NO: 3509) | PEgRNA spacer (AAG PAM) |
| 3510 | TCAGCATTAAACATTTCAA (SEQ ID NO: 3510) | PEgRNA spacer (AAG PAM) |
| 2672 | TTCAGCATTAAACATTTCAA (SEQ ID NO: 2672) | PEgRNA spacer (AAG PAM) |
| 3511 | ATTCAGCATTAAACATTTCAA (SEQ ID NO: 3511) | PEgRNA spacer (AAG PAM) |
| 3512 | CATTCAGCATTAAACATTTCAA (SEQ ID NO: 3512) | PEgRNA spacer (AAG PAM) |
| 3513 | AAATG | PBS |
| 3514 | AAATGT | PBS |
| 3515 | AAATGTT | PBS |
| 3516 | AAATGTTT | PBS |
| 3517 | AAATGTTTA | PBS |
| 3518 | AAATGTTTAA (SEQ ID NO: 3518) | PBS |
| 3519 | AAATGTTTAAT (SEQ ID NO: 3519) | PBS |
| 3520 | AAATGTTTAATG (SEQ ID NO: 3520) | PBS |
| 3521 | AAATGTTTAATGC (SEQ ID NO: 3521) | PBS |
| 3522 | AAATGTTTAATGCT (SEQ ID NO: 3522) | PBS |
| 3523 | AAATGTTTAATGCTG (SEQ ID NO: 3523) | PBS |
| 3524 | AAATGTTTAATGCTGA (SEQ ID NO: 3524) | PBS |
| 3525 | AAATGTTTAATGCTGAA (SEQ ID NO: 3525) | PBS |
| 3526 | AAATGTTTAATGCTGAAT (SEQ ID NO: 3526) | PBS |
| 3527 | AAATGTTTAATGCTGAATG (SEQ ID NO: 3527) | PBS |
| 3528 | AGTATTTAAAATTTATCACTTTTG (SEQ ID NO: | RTT |
| | 3528) | |
| 3529 | GAGTATTTAAAATTTATCACTTTTG (SEQ ID NO: | RTT |
| | 3529) | |
| 3530 | TGAGTATTTAAAATTTATCACTTTTG (SEQ ID NO: | RTT |
| | 3530) | |
| 3531 | GTGAGTATTTAAAATTTATCACTTTTG (SEQ ID | RTT |
| | NO: 3531) | |
| 3532 | TGTGAGTATTTAAAATTTATCACTTTTG (SEQ ID | RTT |
| | NO: 3532) | |
| 3533 | ATGTGAGTATTTAAAATTTATCACTTTTG (SEQ ID | RTT |
| | NO: 3533) | |
| 3534 | AATGTGAGTATTTAAAATTTATCACTTTTG (SEQ | RTT |
| | ID NO: 3534) | |
| 3535 | AAATGTGAGTATTTAAAATTTATCACTTTTG (SEQ | RTT |
| | ID NO: 3535) | |
| 3536 | AAAATGTGAGTATTTAAAATTTATCACTTTTG | RTT |
| | (SEQ ID NO: 3536) | |
| 3537 | AAAAATGTGAGTATTTAAAATTTATCACTTTTG | RTT |
| | (SEQ ID NO: 3537) | |
| 3538 | TAAAAATGTGAGTATTTAAAATTTATCACTTTTG | RTT |
| | (SEQ ID NO: 3538) | |
| 3539 | TTAAAAATGTGAGTATTTAAAATTTATCACTTTT | RTT |
| | G (SEQ ID NO: 3539) | |
| 3540 | CTTAAAAATGTGAGTATTTAAAATTTATCACTTT | RTT |
| | TG (SEQ ID NO: 3540) | |
| 3541 | GCTTAAAAATGTGAGTATTTAAAATTTATCACTT | RTT |
| | TTG (SEQ ID NO: 3541) | |
| 3542 | TGCTTAAAAATGTGAGTATTTAAAATTTATCACT | RTT |
| | TTTG (SEQ ID NO: 3542) | |
| 3543 | TTGCTTAAAAATGTGAGTATTTAAAATTTATCAC | RTT |
| | TTTTG (SEQ ID NO: 3543) | |
| 3544 | TTTGCTTAAAAATGTGAGTATTTAAAATTTATCA | RTT |
| | CTTTTG (SEQ ID NO: 3544) | |
| 3550 | GAGTATTTAAAATTTATCATTGTTG (SEQ ID NO: | RTT (AAG-to-CAA for intronic PEgRNA |
| | 3550) | spacer PAM silencing edit) |
| 3551 | TGAGTATTTAAAATTTATCATTGTTG (SEQ ID NO: | RTT (AAG-to-CAA for intronic PEgRNA |
| | 3551) | spacer PAM silencing edit) |
| 3552 | GTGAGTATTTAAAATTTATCATTGTTG (SEQ ID | RTT (AAG-to-CAA for intronic PEgRNA |
| | NO: 3552) | spacer PAM silencing edit) |
| 3553 | TGTGAGTATTTAAAATTTATCATTGTTG (SEQ ID | RTT (AAG-to-CAA for intronic PEgRNA |
| | NO: 3553) | spacer PAM silencing edit) |
| 3554 | ATGTGAGTATTTAAAATTTATCATTGTTG (SEQ ID | RTT (AAG-to-CAA for intronic PEgRNA |
| | NO: 3554) | spacer PAM silencing edit) |
| 3555 | AATGTGAGTATTTAAAATTTATCATTGTTG (SEQ | RTT (AAG-to-CAA for intronic PEgRNA |
| | ID NO: 3555) | spacer PAM silencing edit) |
| 3556 | AAATGTGAGTATTTAAAATTTATCATTGTTG (SEQ | RTT (AAG-to-CAA for intronic PEgRNA |
| | ID NO: 3556) | spacer PAM silencing edit) |
| 3557 | AAAATGTGAGTATTTAAAATTTATCATTGTTG | RTT (AAG-to-CAA for intronic PEgRNA |
| | (SEQ ID NO: 3557) | spacer PAM silencing edit) |
| 3558 | AAAAATGTGAGTATTTAAAATTTATCATTGTTG | RTT (AAG-to-CAA for intronic PEgRNA |
| | (SEQ ID NO: 3558) | spacer PAM silencing edit) |
| 3559 | TAAAAATGTGAGTATTTAAAATTTATCATTGTTG | RTT (AAG-to-CAA for intronic PEgRNA |
| | (SEQ ID NO: 3559) | spacer PAM silencing edit) |
| 3560 | TTAAAAATGTGAGTATTTAAAATTTATCATTGTT | RTT (AAG-to-CAA for intronic PEgRNA |
| | G (SEQ ID NO: 3560) | spacer PAM silencing edit) |
| 3561 | CTTAAAAATGTGAGTATTTAAAATTTATCATTGT | RTT (AAG-to-CAA for intronic PEgRNA |
| | TG (SEQ ID NO: 3561) | spacer PAM silencing edit) |
| 3562 | GCTTAAAAATGTGAGTATTTAAAATTTATCATTG | RTT (AAG-to-CAA for intronic PEgRNA |
| | TTG (SEQ ID NO: 3562) | spacer PAM silencing edit) |
| 3563 | TGCTTAAAAATGTGAGTATTTAAAATTTATCATT | RTT (AAG-to-CAA for intronic PEgRNA |
| | GTTG (SEQ ID NO: 3563) | spacer PAM silencing edit) |
| 3564 | TTGCTTAAAAATGTGAGTATTTAAAATTTATCAT | RTT (AAG-to-CAA for intronic PEgRNA |
| | TGTTG (SEQ ID NO: 3564) | spacer PAM silencing edit) |
| 3565 | TTTGCTTAAAAATGTGAGTATTTAAAATTTATCA | RTT (AAG-to-CAA for intronic PEgRNA |
| | TTGTTG (SEQ ID NO: 3565) | spacer PAM silencing edit) |
| 3545 | AGAAGTTGCTCTTTTCACTC (SEQ ID NO: 3545) | PE3 ngRNA spacer (AAG PAM) |
| 3546 | AGCACTCAGATTTGATAAAG (SEQ ID NO: 3546) | PE3 ngRNA spacer (AAG PAM) |
| 2634 | AGGTCTTGGGTATGCACCTA (SEQ ID NO: 2634) | PE3 ngRNA spacer (TAG PAM) |
| 3547 | TCTCATATACTTTCAGCACT (SEQ ID NO: 3547) | PE3 ngRNA spacer (CAG PAM) |
| 3548 | TGTATTATCTCATATACTTT (SEQ ID NO: 3548) | PE3 ngRNA spacer (CAG PAM) |
| 3549 | TTCAGCACTCAGATTTGATA (SEQ ID NO: 3549) | PE3 ngRNA spacer (AAG PAM) |

### Pharmaceutical Compositions

[0390] Disclosed herein are pharmaceutical compositions comprising any of the prime editing composition components, for example, prime editors, fusion proteins, polynucleotides encoding prime editor polypeptides, PEgRNAs, ngRNAs, and/or prime editing complexes described herein.

[0391] The term “pharmaceutical composition”, as used herein, refers to a composition formulated for pharmaceutical use. In some embodiments, the pharmaceutical composition further comprises a pharmaceutically acceptable carrier. In some embodiments, the pharmaceutical composition comprises additional agents, e.g., for specific delivery, increasing half-life, or other therapeutic compounds.

[0392] In some embodiments, a pharmaceutically-acceptable carrier comprises any vehicle, such as a liquid or solid filler, diluent, excipient, manufacturing aid (e.g., lubricant, tale magnesium, calcium or zinc stearate, or steric acid), or solvent encapsulating material, involved in carrying or transporting the compound from one site (e.g., the delivery site) of the body, to another site (e.g., organ, tissue or portion of the body). A pharmaceutically acceptable carrier is “acceptable” in the sense of being compatible with the other ingredients of the formulation and not injurious to the tissue of the subject (e.g., physiologically compatible, sterile, physiologic pH, etc.)

[0393] Formulations of the pharmaceutical compositions described herein can be prepared by any method known or hereafter developed in the art of pharmacology. In general, such preparatory methods include the step of bringing the active ingredient(s) into association with an excipient and/or one or more other accessory ingredients, and then, if necessary and/or desirable, shaping and/or packaging the product into a desired single- or multi-dose unit. Pharmaceutical formulations can additionally comprise a pharmaceutically acceptable excipient, which, as used herein, includes any and all solvents, dispersion media, diluents, or other liquid vehicles, dispersion or suspension aids, surface active agents, isotonic agents, thickening or emulsifying agents, preservatives, solid binders, lubricants and the like, as suited to the particular dosage form desired.

### Methods of Editing

[0394] The methods and compositions disclosed herein can be used to edit a target gene of interest by prime editing.

[0395] In some embodiments, the prime editing method comprises contacting a target gene, e.g., an FANCC gene, with a PEgRNA and a prime editor (PE) polypeptide described herein. In some embodiments, the target gene is double stranded, and comprises two strands of DNA complementary to each other. In some embodiments, the contacting with a PEgRNA and the contacting with a prime editor are performed sequentially. In some embodiments, the contacting with a prime editor is performed after the contacting with a PEgRNA. In some embodiments, the contacting with a PEgRNA is performed after the contacting with a prime editor. In some embodiments, the contacting with a PEgRNA, and the contacting with a prime editor are performed simultaneously. In some embodiments, the PEgRNA and the prime editor are associated in a complex prior to contacting a target gene.

[0396] In some embodiments, contacting the target gene with the prime editing composition results in binding of the PEgRNA to a target strand of the target gene, e.g., an FANCC gene. In some embodiments, contacting the target gene with the prime editing composition results in binding of the PEgRNA to a search target sequence on the target strand of the target gene upon contacting with the PEgRNA. In some embodiments, contacting the target gene with the prime editing composition results in binding of a spacer sequence of the PEgRNA to a search target sequence with the search target sequence on the target strand of the target gene upon said contacting of the PEgRNA.

[0397] In some embodiments, contacting the target gene with the prime editing composition results in binding of the prime editor to the target gene, e.g. the target FANCC gene, upon the contacting of the PE composition with the target gene. In some embodiments, the DNA binding domain of the PE associates with the PEgRNA. In some embodiments, the PE binds the target gene, e.g. an FANCC gene, directed by the PEgRNA. Accordingly, in some embodiments, the contacting of the target gene result in binding of a DNA binding domain of a prime editor of the target FANCC gene directed by the PEgRNA.

[0398] In some embodiments, contacting the target gene with the prime editing composition results in a nick in an edit strand of the target gene, e.g. an FANCC gene by the prime editor upon contacting with the target gene, thereby generating a nicked on the edit strand of the target gene. In some embodiments, contacting the target gene with the prime editing composition results in a single-stranded DNA comprising a free 3′ end at the nick site of the edit strand of the target gene. In some embodiments, contacting the target gene with the prime editing composition results in a nick in the edit strand of the target gene by a DNA binding domain of the prime editor, thereby generating a single-stranded DNA comprising a free 3′ end at the nick site. In some embodiments, the DNA binding domain of the prime editor is a Cas domain. In some embodiments, the DNA binding domain of the prime editor is a Cas9. In some embodiments, the DNA binding domain of the prime editor is a Cas9 nickase.

[0399] In some embodiments, contacting the target gene with the prime editing composition results in hybridization of the PEgRNA with the 3′ end of the nicked single-stranded DNA, thereby priming DNA polymerization by a DNA polymerase domain of the prime editor. In some embodiments, the free 3′ end of the single-stranded DNA generated at the nick site hybridizes to a primer binding site sequence (PBS) of the contacted PEgRNA, thereby priming DNA polymerization. In some embodiments, the DNA polymerization is reverse transcription catalyzed by a reverse transcriptase domain of the prime editor. In some embodiments, the method comprises contacting the target gene with a DNA polymerase, e.g., a reverse transcriptase, as a part of a prime editor fusion protein or prime editing complex (in cis), or as a separate protein (in trans).

[0400] In some embodiments, contacting the target gene with the prime editing composition generates an edited single stranded DNA that is coded by the editing template of the PEgRNA by DNA polymerase mediated polymerization from the 3′ free end of the single-stranded DNA at the nick site. In some embodiments, the editing template of the PEgRNA comprises one or more intended nucleotide edits compared to endogenous sequence of the target gene, e.g., an FANCC gene. In some embodiments, the intended nucleotide edits are incorporated in the target gene, by excision of the 5′ single stranded DNA of the edit strand of the target gene generated at the nick site and DNA repair. In some embodiments, the intended nucleotide edits are incorporated in the target gene by excision of the editing target sequence and DNA repair. In some embodiments, excision of the 5′ single stranded DNA of the edit strand generated at the nick site is by a flap endonuclease. In some embodiments, the flap nuclease is FEN1. In some embodiments, the method further comprises contacting the target gene with a flap endonuclease. In some embodiments, the flap endonuclease is provided as a part of a prime editor fusion protein. In some embodiments, the flap endonuclease is provided in trans.

[0401] In some embodiments, contacting the target gene with the prime editing composition generates a mismatched heteroduplex comprising the edit strand of the target gene that comprises the edited single stranded DNA, and the unedited target strand of the target gene. Without being bound by theory, the endogenous DNA repair and replication may resolve the mismatched edited DNA to incorporate the nucleotide change(s) to form the desired edited target gene.

[0402] In some embodiments, the method further comprises contacting the target gene, e.g. an FANCC gene, with a nick guide (ngRNA) disclosed herein. In some embodiments, the ngRNA comprises a spacer that binds a second search target sequence on the edit strand of the target gene. In some embodiments, the contacted ngRNA directs the PE to introduce a nick in the target strand of the target gene. In some embodiments, the nick on the target strand (non-edit strand) results in endogenous DNA repair machinery to use the edit strand to repair the non-edit strand, thereby incorporating the intended nucleotide edit in both strand of the target gene and modifying the target gene. In some embodiments, the ngRNA comprises a spacer sequence that is complementary to, and may hybridize with, the second search target sequence on the edit strand only after the intended nucleotide edit(s) are incorporated in the edit strand of the target gene.

[0403] In some embodiments, the target gene is contacted by the ngRNA, the PEgRNA, and the PE simultaneously. In some embodiments, the ngRNA, the PEgRNA, and the PE form a complex when they contact the target gene. In some embodiments, the target gene is contacted with the ngRNA, the PEgRNA, and the prime editor sequentially. In some embodiments, the target gene is contacted with the ngRNA and/or the PEgRNA after contacting the target gene with the PE. In some embodiments, the target gene is contacted with the ngRNA and/or the PEgRNA before contacting the target gene with the prime editor.

[0404] In some embodiments, the target gene, e.g. a FANCC gene, is in a cell. Accordingly, also provided herein are methods of modifying a cell, such as a human cell, a human primary cell, a human iPSC-derived cell, and HSPC.

[0405] In some embodiments, the prime editing method comprises introducing a PEgRNA, a prime editor, and/or a ngRNA into the cell that has the target gene. In some embodiments, the prime editing method comprises introducing into the cell that has the target gene with a prime editing composition comprising a PEgRNA, a prime editor polypeptide, and/or a ngRNA. In some embodiments, the PEgRNA, the prime editor polypeptide, and/or the ngRNA form a complex prior to the introduction into the cell. In some embodiments, the PEgRNA, the prime editor polypeptide, and/or the ngRNA form a complex after the introduction into the cell. The prime editors, PEgRNA and/or ngRNAs, and prime editing complexes may be introduced into the cell by any delivery approaches described herein or any delivery approach known in the art, including ribonucleoprotein (RNPs), lipid nanoparticles (LNPs), viral vectors, non-viral vectors, mRNA delivery, and physical techniques such as cell membrane disruption by a microfluidics device. The prime editors, PEgRNA and/or ngRNAs, and prime editing complexes may be introduced into the cell simultaneously or sequentially.

[0406] In some embodiments, the prime editing method comprises introducing into the cell a PEgRNA or a polynucleotide encoding the PEgRNA, a prime editor polynucleotide encoding a prime editor polypeptide, and optionally an ngRNA or a polynucleotide encoding the ngRNA. In some embodiments, the method comprises introducing the PEgRNA or the polynucleotide encoding the PEgRNA, the polynucleotide encoding the prime editor polypeptide, and/or the ngRNA or the polynucleotide encoding the ngRNA into the cell simultaneously. In some embodiments, the method comprises introducing the PEgRNA or the polynucleotide encoding the PEgRNA, the polynucleotide encoding the prime editor polypeptide, and/or the ngRNA or the polynucleotide encoding the ngRNA into the cell sequentially. In some embodiments, the method comprises introducing the polynucleotide encoding the prime editor polypeptide into the cell before introduction of the PEgRNA or the polynucleotide encoding the PEgRNA and/or the ngRNA or the polynucleotide encoding the ngRNA. In some embodiments, the polynucleotide encoding the prime editor polypeptide is introduced into and expressed in the cell before introduction of the PEgRNA or the polynucleotide encoding the PEgRNA and/or the ngRNA or the polynucleotide encoding the ngRNA into the cell. In some embodiments, the polynucleotide encoding the prime editor polypeptide is introduced into the cell after the PEgRNA or the polynucleotide encoding the PEgRNA and/or the ngRNA or the polynucleotide encoding the ngRNA are introduced into the cell. The polynucleotide encoding the prime editor polypeptide, the PEgRNA or the polynucleotide encoding the PEgRNA, and/or the ngRNA or the polynucleotide encoding the ngRNA, may be introduced into the cell by any delivery approaches described herein or any delivery approach known in the art, for example, by RNPs, LNPs, viral vectors, non-viral vectors, mRNA delivery, and physical delivery. In some embodiments, the polynucleotide is a DNA polynucleotide. In some embodiments, the polynucleotide is a RNA polynucleotide, e.g., mRNA polynucleotide.

[0407] In some embodiments, the polynucleotide encoding the prime editor polypeptide, the polynucleotide encoding the PEgRNA, and/or the polynucleotide encoding the ngRNA integrate into the genome of the cell after being introduced into the cell. In some embodiments, the polynucleotide encoding the prime editor polypeptide, the polynucleotide encoding the PEgRNA, and/or the polynucleotide encoding the ngRNA are introduced into the cell for transient expression. Accordingly, also provided herein are cells modified by prime editing.

[0408] In some embodiments, the cell is a eukaryotic cell. In some embodiments, the cell is a mammalian cell. In some embodiments, the cell is a non-human primate cell, bovine cell, porcine cell, rodent or mouse cell. In some embodiments, the cell is a human cell.

[0409] In some embodiments, the cell is a eukaryotic cell. In some embodiments, the cell is a mammalian cell. In some embodiments, the cell is a human cell. In some embodiments, the cell is a primary cell. In some embodiments, the cell is a human primary cell. In some embodiments, the cell is a progenitor cell. In some embodiments, the cell is a human progenitor cell. In some embodiments, the cell is a hepatocyte. In some embodiments, the cell is a human HSPC. In some embodiments, the cell is a progenitor cell. In some embodiments, the cell is a stem cell. in some embodiments, the cell is an induced pluripotent stem cell. In some embodiments, the cell is an embryonic stem cell. In some embodiments, the cell is a hematopoietic progenitor cell. In some embodiments, the cell is a hematopoietic stem cell. In some embodiments, the cell is a hematopoietic stem or progenitor cell (HSPC). In some embodiments, the cell is a fibroblast. In some embodiments, the cell is a CD34+ cell. In some embodiments, the cell is a hematopoietic stem cell (HSC). In some embodiments, the cell is a hematopoietic progenitor cell (HPC). In some embodiments, the cell is a human HSPC. In some embodiments, the cell is a human HPC. In some embodiments, the cell is a human HSC. In some embodiments, the cell is a long term (LT)-HSC. In some embodiments, the cell is a short-term(ST)-HSC. In some embodiments, the cell is a myeloid progenitor cell. In some embodiments, the cell is a lymphoid progenitor cell. In some embodiments, the cell is a granulocyte monocyte progenitor cell. In some embodiments, the cell is a megakaryocyte erythroid progenitor cell.

[0410] In some embodiments, the cell is a human progenitor cell. In some embodiments, the cell is a human stem cell. in some embodiments, the cell is an induced human pluripotent stem cell. In some embodiments, the cell is a human embryonic stem cell. In some embodiments, the cell is a human fibroblast. In some embodiments, the cell is a primary cell. In some embodiments, the cell is a human primary cell. In some embodiments, the cell is a differentiated cell.

[0411] In some embodiments, the target gene edited by prime editing is in a chromosome of the cell. In some embodiments, the intended nucleotide edits incorporate in the chromosome of the cell and are inheritable by progeny cells. In some embodiments, the intended nucleotide edits introduced to the cell by the prime editing compositions and methods are such that the cell and progeny of the cell also include the intended nucleotide edits. In some embodiments, the cell is autologous, allogeneic, or xenogeneic to a subject. In some embodiments, the cell is from or derived from a subject. In some embodiments, the cell is from or derived from a human subject. In some embodiments, the cell is introduced back into the subject, e.g., a human subject, after incorporation of the intended nucleotide edits by prime editing.

[0412] In some embodiments, the method provided herein comprises introducing the prime editor polypeptide or the polynucleotide encoding the prime editor polypeptide, the PEgRNA or the polynucleotide encoding the PEgRNA, and/or the ngRNA or the polynucleotide encoding the ngRNA into a plurality or a population of cells that comprise the target gene. In some embodiments, the population of cells is of the same cell type. In some embodiments, the population of cells is of the same tissue or organ. In some embodiments, the population of cells is heterogeneous. In some embodiments, the population of cells is homogeneous. In some embodiments, the population of cells is from a single tissue or organ, and the cells are heterogeneous. In some embodiments, the introduction into the population of cells is ex vivo. In some embodiments, the introduction into the population of cells is in vivo, e.g., into a human subject.

[0413] In some embodiments, the target gene is in a genome of each cell of the population. In some embodiments, introduction of the prime editor polypeptide or the polynucleotide encoding the prime editor polypeptide, the PEgRNA or the polynucleotide encoding the PEgRNA, and/or the ngRNA or the polynucleotide encoding the ngRNA results in incorporation of one or more intended nucleotide edits in the target gene in at least one of the cells in the population of cells. In some embodiments, introduction of the prime editor polypeptide or the polynucleotide encoding the prime editor polypeptide, the PEgRNA or the polynucleotide encoding the PEgRNA, and/or the ngRNA or the polynucleotide encoding the ngRNA results in incorporation of the one or more intended nucleotide edits in the target gene in a plurality of the population of cells. In some embodiments, introduction of the prime editor polypeptide or the polynucleotide encoding the prime editor polypeptide, the PEgRNA or the polynucleotide encoding the PEgRNA, and/or the ngRNA or the polynucleotide encoding the ngRNA results in incorporation of the one or more intended nucleotide edits in the target gene in each cell of the population of cells. In some embodiments, introduction of the prime editor polypeptide or the polynucleotide encoding the prime editor polypeptide, the PEgRNA or the polynucleotide encoding the PEgRNA, and/or the ngRNA or the polynucleotide encoding the ngRNA results in incorporation of the one or more intended nucleotide edits in the target gene in sufficient number of cells such that the disease or disorder is treated, prevented or ameliorated.

[0414] In some embodiments, editing efficiency of the prime editing compositions and method described herein can be measured by calculating the percentage of edited target genes in a population of cells introduced with the prime editing composition. In some embodiments, the editing efficiency is determined after 1 hour, 2 hours, 6 hours, 12 hours, 24 hours, 36 hours, 48 hours, 3 days, 4 days, 5 days, 7 days, 10 days, or 14 days of exposing a target gene (e.g., a FANCC gene within the genome of a cell) to a prime editing composition. In some embodiments, editing efficiency of the prime editing compositions and method described herein can be measured by calculating the percentage of edited target genes in a population of cells introduced with the prime editing composition. In some embodiments, the editing efficiency is determined after 5, 6, 7, 8, 9, 10, 11, 12, 13, 14, 15, or 16 weeks of exposing a target (e.g., a FANCC gene within the genome of a cell) to a prime editing composition. In some embodiments, the population of cells introduced with the prime editing composition is ex vivo. In some embodiments, the population of cells introduced with the prime editing composition is in vitro. In some embodiments, the population of cells introduced with the prime editing composition is in vivo. In some embodiments, the prime editing methods disclosed herein have an editing efficiency of at least about 1%, at least about 5%, at least about 10%, at least about 20%, at least about 30%, at least about 40%, at least about 50%, at least about 60%, at least about 70%, at least about 80%, at least about 90%, at least about 95%, or at least about 99% relative to a suitable control. In some embodiments, the prime editing methods disclosed herein have an editing efficiency of at least 25% relative to a suitable control. In some embodiments, the prime editing methods disclosed herein have an editing efficiency of at least 35% relative to a suitable control. prime editing method disclosed herein has an editing efficiency of at least 30% relative to a suitable control. In some embodiments, the prime editing methods disclosed herein have an editing efficiency of at least 45% relative to a suitable control. In some embodiments, the prime editing methods disclosed herein have an editing efficiency of at least 50% relative to a suitable control. In some embodiments, editing efficiency of the prime editing compositions and method described herein can be measured by calculating the percentage of edited target genes in a population of cells after in vivo engraftment of the edited cells. In some embodiments, the editing efficiency is determined after 5, 6, 7, 8, 9, 10, 11, 12, 13, 14, 15, or 16 weeks of engraftment. In some embodiments, the editing efficiency is determined after 8 or 16 weeks of engraftment. In some embodiments, prime editing is able to maintain in edited cells at least about 10%, about 15%, about 20%, about 25%, about 30%, about 35%, about 40%, about 45%, about 50%, about 55%, about 60%, about 65%, about 70%, about 75%, about 80%, about 85%, about 90%, about 95% or more than 95% of editing efficiency after 8 or 16 weeks post engraftment.

[0415] In some embodiments, the methods disclosed herein have an editing efficiency of at least about 1%, at least about 5%, at least about 7.5%, at least about 10%, at least about 15%, at least about 20%, at least about 30%, at least about 40%, at least about 50%, at least about 60%, at least about 70%, at least about 80%, at least about 90%, or at least about 95% of editing a target cell, e.g., a human HSPC(as measured in a population of cells) relative to a suitable control.

[0416] In some embodiments, the methods disclosed herein have an editing efficiency of at least about 5%, at least about 7.5%, at least about 10%, at least about 15%, at least about 20%, at least about 30%, at least about 40%, at least about 50%, at least about 60%, at least about 70%, at least about 80%, at least about 90%, or at least about 95% of editing a target cell (e.g., HSPC) relative to a corresponding control cell HSPC. In some embodiments, the target cell is a human cell. In some embodiments, the HSPC is a human HSPC.

[0417] In some embodiments, the prime editing compositions provided herein are capable of incorporated one or more intended nucleotide edits without generating a significant proportion of indels. The term “indel(s)”, as used herein, refers to the insertion or deletion of a nucleotide base within a polynucleotide, for example, a target gene. Such insertions or deletions can lead to frame shift mutations within a coding region of a gene. Indel frequency of editing can be calculated by methods known in the art. In some embodiments, indel frequency can be calculated based on sequence alignment such as the CRISPResso 2 algorithm as described in Clement et al., Nat. Biotechnol. 37(3): 224-226 (2019), which is incorporated herein in its entirety. In some embodiments, the prime editing methods disclosed herein can have an indel frequency of less than 30%, less than 20%, less than 10%, less than 9%, less than 8%, less than 7%, less than 6%, less than 5%, less than 4%, less than 3%, less than 2%, less than 1.5%, or less than 1%.

[0418] In some embodiments, any number of indels is determined after at least 1 hour, at least 2 hours, at least 6 hours, at least 12 hours, at least 24 hours, at least 36 hours, at least 48 hours, at least 3 days, at least 4 days, at least 5 days, at least 7 days, at least 10 days, or at least 14 days of exposing a target gene (e.g., a FANCC gene within the genome of a cell) to a prime editing composition.

[0419] In some embodiments, the prime editing compositions provided herein are capable of incorporating one or more intended nucleotide edits efficiently without generating a significant proportion of indels in a population of target cells as compared to a population of corresponding control cells. In some embodiments, the population of target cell comprises a population of human primary cells, human iPSCs, or human HSPCs.

[0420] In some embodiments, the prime editing methods disclosed herein have an editing efficiency of at least about 1% and an indel frequency of less than 10% in a population of target cells, e.g., a population of human HSPCs. In some embodiments, the prime editing methods disclosed herein have an editing efficiency of at least about 1% and an indel frequency of less than 7.5% in a population of target cells, e.g., a population of human HSPCs. In some embodiments, the prime editing methods disclosed herein have an editing efficiency of at least about 1% and an indel frequency of less than 5% in a population of target cells, e.g., a population of human HSPCs. In some embodiments, the prime editing methods disclosed herein have an editing efficiency of at least about 1% and an indel frequency of less than 2.5% in a population of target cells, e.g., a population of human HSPCs. In some embodiments, the prime editing methods disclosed herein have an editing efficiency of at least about 1% and an indel frequency of less than 1% in a population of target cells, e.g., a population of human HSPCs. In some embodiments, the prime editing methods disclosed herein have an editing efficiency of at least about 1% and an indel frequency of less than 0.5% in a population of target cells, e.g., a population of human HSPCs. In some embodiments, the prime editing methods disclosed herein have an editing efficiency of at least about 1% and an indel frequency of less than 0.1% in a population of target cells, e.g., a population of human HSPCs.

[0421] In some embodiments, the prime editing methods disclosed herein have an editing efficiency of at least about 5% and an indel frequency of less than 10% in a population of target cells, e.g., a population of human HSPCs. In some embodiments, the prime editing methods disclosed herein have an editing efficiency of at least about 5% and an indel frequency of less than 7.5% in a population of target cells, e.g., a population of human HSPCs. In some embodiments, the prime editing methods disclosed herein have an editing efficiency of at least about 5% and an indel frequency of less than 5% in a population of target cells, e.g., a population of human HSPCs. In some embodiments, the prime editing methods disclosed herein have an editing efficiency of at least about 5% and an indel frequency of less than 2.5% in a population of target cells, e.g., a population of human HSPCs. In some embodiments, the prime editing methods disclosed herein have an editing efficiency of at least about 5% and an indel frequency of less than 1% in a population of target cells, e.g., a population of human HSPCs. In some embodiments, the prime editing methods disclosed herein have an editing efficiency of at least about 5% and an indel frequency of less than 0.5% in a population of target cells, e.g., a population of human HSPCs. In some embodiments, the prime editing methods disclosed herein have an editing efficiency of at least about 5% and an indel frequency of less than 0.1% in a population of target cells, e.g., a population of human HSPCs.

[0422] In some embodiments, the prime editing methods disclosed herein have an editing efficiency of at least about 7.5% and an indel frequency of less than 10% in a population of target cells, e.g., a population of human HSPCs. In some embodiments, the prime editing methods disclosed herein have an editing efficiency of at least about 7.5% and an indel frequency of less than 7.5% in a population of target cells, e.g., a population of human HSPCs. In some embodiments, the prime editing methods disclosed herein have an editing efficiency of at least about 7.5% and an indel frequency of less than 5% in a population of target cells, e.g., a population of human HSPCs. In some embodiments, the prime editing methods disclosed herein have an editing efficiency of at least about 7.5% and an indel frequency of less than 2.5% in a population of target cells, e.g., a population of human HSPCs. In some embodiments, the prime editing methods disclosed herein have an editing efficiency of at least about 7.5% and an indel frequency of less than 1% in a population of target cells, e.g., a population of human HSPCs. In some embodiments, the prime editing methods disclosed herein have an editing efficiency of at least about 7.5% and an indel frequency of less than 0.5% in a population of target cells, e.g., a population of human HSPCs. In some embodiments, the prime editing methods disclosed herein have an editing efficiency of at least about 7.5% and an indel frequency of less than 0.1% in a population of target cells, e.g., a population of human HSPCs.

[0423] In some embodiments, the prime editing methods disclosed herein have an editing efficiency of at least about 10% and an indel frequency of less than 10% in a population of target cells, e.g., a population of human HSPCs. In some embodiments, the prime editing methods disclosed herein have an editing efficiency of at least about 10% and an indel frequency of less than 7.5% in a population of target cells, e.g., a population of human HSPCs. In some embodiments, the prime editing methods disclosed herein have an editing efficiency of at least about 10% and an indel frequency of less than 5% in a population of target cells, e.g., a population of human HSPCs. In some embodiments, the prime editing methods disclosed herein have an editing efficiency of at least about 10% and an indel frequency of less than 2.5% in a population of target cells, e.g., a population of human HSPCs. In some embodiments, the prime editing methods disclosed herein have an editing efficiency of at least about 10% and an indel frequency of less than 1% in a population of target cells, e.g., a population of human HSPCs. In some embodiments, the prime editing methods disclosed herein have an editing efficiency of at least about 10% and an indel frequency of less than 0.5% in a population of target cells, e.g., a population of human HSPCs. In some embodiments, the prime editing methods disclosed herein have an editing efficiency of at least about 10% and an indel frequency of less than 0.1% in a population of target cells, e.g., a population of human HSPCs.

[0424] In some embodiments, the prime editing methods disclosed herein have an editing efficiency of at least about 15% and an indel frequency of less than 10% in a population of target cells, e.g., a population of human HSPCs. In some embodiments, the prime editing methods disclosed herein have an editing efficiency of at least about 15% and an indel frequency of less than 7.5% in a population of target cells, e.g., a population of human HSPCs. In some embodiments, the prime editing methods disclosed herein have an editing efficiency of at least about 15% and an indel frequency of less than 5% in a population of target cells, e.g., a population of human HSPCs. In some embodiments, the prime editing methods disclosed herein have an editing efficiency of at least about 15% and an indel frequency of less than 2.5% in a population of target cells, e.g., a population of human HSPCs. In some embodiments, the prime editing methods disclosed herein have an editing efficiency of at least about 15% and an indel frequency of less than 1% in a population of target cells, e.g., a population of human HSPCs. In some embodiments, the prime editing methods disclosed herein have an editing efficiency of at least about 15% and an indel frequency of less than 0.5% in a population of target cells, e.g., a population of human HSPCs. In some embodiments, the prime editing methods disclosed herein have an editing efficiency of at least about 15% and an indel frequency of less than 0.1% in a population of target cells, e.g., a population of human HSPCs.

[0425] In some embodiments, the prime editing methods disclosed herein have an editing efficiency of at least about 20% and an indel frequency of less than 10% in a population of target cells, e.g., a population of human HSPCs. In some embodiments, the prime editing methods disclosed herein have an editing efficiency of at least about 20% and an indel frequency of less than 7.5% in a population of target cells, e.g., a population of human HSPCs. In some embodiments, the prime editing methods disclosed herein have an editing efficiency of at least about 20% and an indel frequency of less than 5% in a population of target cells, e.g., a population of human HSPCs. In some embodiments, the prime editing methods disclosed herein have an editing efficiency of at least about 20% and an indel frequency of less than 2.5% in a population of target cells, e.g., a population of human HSPCs. In some embodiments, the prime editing methods disclosed herein have an editing efficiency of at least about 20% and an indel frequency of less than 1% in a population of target cells, e.g., a population of human HSPCs. In some embodiments, the prime editing methods disclosed herein have an editing efficiency of at least about 20% and an indel frequency of less than 0.5% in a population of target cells, e.g., a population of human HSPCs. In some embodiments, the prime editing methods disclosed herein have an editing efficiency of at least about 20% and an indel frequency of less than 0.1% in a population of target cells, e.g., a population of human HSPCs.

[0426] In some embodiments, the prime editing methods disclosed herein have an editing efficiency of at least about 30% and an indel frequency of less than 10% in a population of target cells, e.g., a population of human HSPCs. In some embodiments, the prime editing methods disclosed herein have an editing efficiency of at least about 30% and an indel frequency of less than 7.5% in a population of target cells, e.g., a population of human HSPCs. In some embodiments, the prime editing methods disclosed herein have an editing efficiency of at least about 30% and an indel frequency of less than 5% in a population of target cells, e.g., a population of human HSPCs. In some embodiments, the prime editing methods disclosed herein have an editing efficiency of at least about 30% and an indel frequency of less than 2.5% in a population of target cells, e.g., a population of human HSPCs. In some embodiments, the prime editing methods disclosed herein have an editing efficiency of at least about 30% and an indel frequency of less than 1% in a population of target cells, e.g., a population of human HSPCs. In some embodiments, the prime editing methods disclosed herein have an editing efficiency of at least about 30% and an indel frequency of less than 0.5% in a population of target cells, e.g., a population of human HSPCs. In some embodiments, the prime editing methods disclosed herein have an editing efficiency of at least about 30% and an indel frequency of less than 0.1% in a population of target cells, e.g., a population of human HSPCs.

[0427] In some embodiments, the prime editing methods disclosed herein have an editing efficiency of at least about 40% and an indel frequency of less than 10% in a population of target cells, e.g., a population of human HSPCs. In some embodiments, the prime editing methods disclosed herein have an editing efficiency of at least about 40% and an indel frequency of less than 7.5% in a population of target cells, e.g., a population of human HSPCs. In some embodiments, the prime editing methods disclosed herein have an editing efficiency of at least about 40% and an indel frequency of less than 5% in a population of target cells, e.g., a population of human HSPCs. In some embodiments, the prime editing methods disclosed herein have an editing efficiency of at least about 40% and an indel frequency of less than 2.5% in a population of target cells, e.g., a population of human HSPCs. In some embodiments, the prime editing methods disclosed herein have an editing efficiency of at least about 40% and an indel frequency of less than 1% in a population of target cells, e.g., a population of human HSPCs. In some embodiments, the prime editing methods disclosed herein have an editing efficiency of at least about 40% and an indel frequency of less than 0.5% in a population of target cells, e.g., a population of human HSPCs. In some embodiments, the prime editing methods disclosed herein have an editing efficiency of at least about 40% and an indel frequency of less than 0.1% in a population of target cells, e.g., a population of human HSPCs.

[0428] In some embodiments, the prime editing methods disclosed herein have an editing efficiency of at least about 50% and an indel frequency of less than 10% in a population of target cells, e.g., a population of human HSPCs. In some embodiments, the prime editing methods disclosed herein have an editing efficiency of at least about 50% and an indel frequency of less than 7.5% in a population of target cells, e.g., a population of human HSPCs. In some embodiments, the prime editing methods disclosed herein have an editing efficiency of at least about 50% and an indel frequency of less than 5% in a population of target cells, e.g., a population of human HSPCs. In some embodiments, the prime editing methods disclosed herein have an editing efficiency of at least about 50% and an indel frequency of less than 2.5% in a population of target cells, e.g., a population of human HSPCs. In some embodiments, the prime editing methods disclosed herein have an editing efficiency of at least about 50% and an indel frequency of less than 1% in a population of target cells, e.g., a population of human HSPCs. In some embodiments, the prime editing methods disclosed herein have an editing efficiency of at least about 50% and an indel frequency of less than 0.5% in a population of target cells, e.g., a population of human HSPCs. In some embodiments, the prime editing methods disclosed herein have an editing efficiency of at least about 50% and an indel frequency of less than 0.1% in a population of target cells, e.g., a population of human HSPCs.

[0429] In some embodiments, the prime editing methods disclosed herein have an editing efficiency of at least about 60% and an indel frequency of less than 10% in a population of target cells, e.g., a population of human HSPCs. In some embodiments, the prime editing methods disclosed herein have an editing efficiency of at least about 60% and an indel frequency of less than 7.5% in a population of target cells, e.g., a population of human HSPCs. In some embodiments, the prime editing methods disclosed herein have an editing efficiency of at least about 60% and an indel frequency of less than 5% in a population of target cells, e.g., a population of human HSPCs. In some embodiments, the prime editing methods disclosed herein have an editing efficiency of at least about 60% and an indel frequency of less than 2.5% in a population of target cells, e.g., a population of human HSPCs. In some embodiments, the prime editing methods disclosed herein have an editing efficiency of at least about 60% and an indel frequency of less than 1% in a population of target cells, e.g., a population of human HSPCs. In some embodiments, the prime editing methods disclosed herein have an editing efficiency of at least about 60% and an indel frequency of less than 0.5% in a population of target cells, e.g., a population of human HSPCs. In some embodiments, the prime editing methods disclosed herein have an editing efficiency of at least about 60% and an indel frequency of less than 0.1% in a population of target cells, e.g., a population of human HSPCs.

[0430] In some embodiments, the prime editing methods disclosed herein have an editing efficiency of at least about 70% and an indel frequency of less than 10% in a population of target cells, e.g., a population of human HSPCs. In some embodiments, the prime editing methods disclosed herein have an editing efficiency of at least about 70% and an indel frequency of less than 7.5% in a population of target cells, e.g., a population of human HSPCs. In some embodiments, the prime editing methods disclosed herein have an editing efficiency of at least about 70% and an indel frequency of less than 5% in a population of target cells, e.g., a population of human HSPCs. In some embodiments, the prime editing methods disclosed herein have an editing efficiency of at least about 70% and an indel frequency of less than 2.5% in a population of target cells, e.g., a population of human HSPCs. In some embodiments, the prime editing methods disclosed herein have an editing efficiency of at least about 70% and an indel frequency of less than 1% in a population of target cells, e.g., a population of human HSPCs. In some embodiments, the prime editing methods disclosed herein have an editing efficiency of at least about 70% and an indel frequency of less than 0.5% in a population of target cells, e.g., a population of human HSPCs. In some embodiments, the prime editing methods disclosed herein have an editing efficiency of at least about 70% and an indel frequency of less than 0.1% in a population of target cells, e.g., a population of human HSPCs.

[0431] In some embodiments, the prime editing methods disclosed herein have an editing efficiency of at least about 80% and an indel frequency of less than 10% in a population of target cells, e.g., a population of human HSPCs. In some embodiments, the prime editing methods disclosed herein have an editing efficiency of at least about 80% and an indel frequency of less than 7.5% in a population of target cells, e.g., a population of human HSPCs. In some embodiments, the prime editing methods disclosed herein have an editing efficiency of at least about 80% and an indel frequency of less than 5% in a population of target cells, e.g., a population of human HSPCs. In some embodiments, the prime editing methods disclosed herein have an editing efficiency of at least about 80% and an indel frequency of less than 2.5% in a population of target cells, e.g., a population of human HSPCs. In some embodiments, the prime editing methods disclosed herein have an editing efficiency of at least about 80% and an indel frequency of less than 1% in a population of target cells, e.g., a population of human HSPCs. In some embodiments, the prime editing methods disclosed herein have an editing efficiency of at least about 80% and an indel frequency of less than 0.5% in a population of target cells, e.g., a population of human HSPCs. In some embodiments, the prime editing methods disclosed herein have an editing efficiency of at least about 80% and an indel frequency of less than 0.1% in a population of target cells, e.g., a population of human HSPCs.

[0432] In some embodiments, the prime editing methods disclosed herein have an editing efficiency of at least about 90% and an indel frequency of less than 10% in a population of target cells, e.g., a population of human HSPCs. In some embodiments, the prime editing methods disclosed herein have an editing efficiency of at least about 90% and an indel frequency of less than 7.5% in a population of target cells, e.g., a population of human HSPCs. In some embodiments, the prime editing methods disclosed herein have an editing efficiency of at least about 90% and an indel frequency of less than 5% in a population of target cells, e.g., a population of human HSPCs. In some embodiments, the prime editing methods disclosed herein have an editing efficiency of at least about 90% and an indel frequency of less than 2.5% in a population of target cells, e.g., a population of human HSPCs. In some embodiments, the prime editing methods disclosed herein have an editing efficiency of at least about 90% and an indel frequency of less than 1% in a population of target cells, e.g., a population of human HSPCs. In some embodiments, the prime editing methods disclosed herein have an editing efficiency of at least about 90% and an indel frequency of less than 0.5% in a population of target cells, e.g., a population of human HSPCs. In some embodiments, the prime editing methods disclosed herein have an editing efficiency of at least about 90% and an indel frequency of less than 0.1% in a population of target cells, e.g., a population of human HSPCs.

[0433] In some embodiments, the prime editing methods disclosed herein have an editing efficiency of at least about 95% and an indel frequency of less than 10% in a population of target cells, e.g., a population of human HSPCs. In some embodiments, the prime editing methods disclosed herein have an editing efficiency of at least about 95% and an indel frequency of less than 7.5% in a population of target cells, e.g., a population of human HSPCs. In some embodiments, the prime editing methods disclosed herein have an editing efficiency of at least about 95% and an indel frequency of less than 5% in a population of target cells, e.g., a population of human HSPCs. In some embodiments, the prime editing methods disclosed herein have an editing efficiency of at least about 95% and an indel frequency of less than 2.5% in a population of target cells, e.g., a population of human HSPCs. In some embodiments, the prime editing methods disclosed herein have an editing efficiency of at least about 95% and an indel frequency of less than 1% in a population of target cells, e.g., a population of human HSPCs. In some embodiments, the prime editing methods disclosed herein have an editing efficiency of at least about 95% and an indel frequency of less than 0.5% in a population of target cells, e.g., a population of human HSPCs. In some embodiments, the prime editing methods disclosed herein have an editing efficiency of at least about 95% and an indel frequency of less than 0.1% in a population of target cells, e.g., a population of human HSPCs.

[0434] In some embodiments, any number of indels is determined after at least 1 hour, at least 2 hours, at least 6 hours, at least 12 hours, at least 24 hours, at least 36 hours, at least 48 hours, at least 3 days, at least 4 days, at least 5 days, at least 7 days, at least 10 days, or at least 14 days of exposing a target gene (e.g., a FANCC gene within the genome of a cell) to a prime editing composition. In some embodiments, the editing efficiency is determined after 1 hour, 2 hours, 6 hours, 12 hours, 24 hours, 36 hours, 48 hours, 3 days, 4 days, 5 days, 7 days, 10 days, or 14 days of exposing a target gene (e.g., a FANCC gene within the genome of a cell) to a prime editing composition.

[0435] In some embodiments, the prime editing composition described herein result in less than 50%, less than 40%, less than 30%, less than 20%, less than 19%, less than 18%, less than 17%, less than 16%, less than 15%, less than 14%, less than 13%, less than 12%, less than 11%, less than 10%, less than 9%, less than 8%, less than 7%, less than 6%, less than 5%, less than 4%, less than 3%, less than 2%, less than 1%, less than 0.9%, less than 0.8%, less than 0.7%, less than 0.6%, less than 0.5%, less than 0.4%, less than 0.3%, less than 0.2%, less than 0.1%, less than 0.09%, less than 0.08%, less than 0.07%, less than 0.06%, less than 0.05%, less than 0.04%, less than 0.03%, less than 0.02%, or less than 0.01% off-target editing in a chromosome that includes the target gene. In some embodiments, off-target editing is determined after at least 1 hour, at least 2 hours, at least 6 hours, at least 12 hours, at least 24 hours, at least 36 hours, at least 48 hours, at least 3 days, at least 4 days, at least 5 days, at least 7 days, at least 10 days, or at least 14 days of exposing a target gene (e.g., a nucleic acid within the genome of a cell) to a prime editing composition.

[0436] In some embodiments, the prime editing methods described herein result in less than 10%, less than 9%, less than 8%, less than 7%, less than 6%, less than 5%, less than 4%, less than 3%, less than 2%, less than 1%, or less than 0.5% large deletion in edited cells. In some embodiments, the prime editing methods described herein result in less than 4% large deletion in edited cells. In some embodiments, the prime editing methods described herein result in less than 3% large deletion in edited cells. In some embodiments, the prime editing methods described herein result in less than 2% large deletion in edited cells. In some embodiments, the prime editing methods described herein result in less than 1% large deletion in edited cells. In some embodiments, the prime editing methods described herein does not result in detectable level of large deletion in edited cells.

[0437] In some embodiments, the prime editing compositions (e.g., PEgRNAs and prime editors as described herein) and prime editing methods disclosed herein can be used to edit a target FANCC gene. In some embodiments, the target FANCC gene comprises a mutation compared to a wild type FANCC gene. In some embodiments, the mutation is associated with Fanconi anemia. In some embodiments, the target FANCC gene comprises an editing target sequence that contains the mutation associated with Fanconi anemia. In some embodiments, the mutation is in a coding region of the target FANCC gene. In some embodiments, the mutation is in an exon of the target FANCC gene. In some embodiments, the mutation is in exon 1 of the FANCC gene as compared to a wild type FANCC gene. In some embodiments, the editing target sequence comprises a mutation in an intron of the FANCC gene as compared to a wild type FANCC gene. In some embodiments, the mutation is in intron 4 of the FANCC gene as compared to a wild type FANCC gene.

[0438] Unless otherwise indicated, references to nucleotide positions in human chromosomes are as set forth in human genome assembly consortium Human build 38 (GRCh38), GenBank accession GCF_000001405.38.

[0439] In some embodiments, the editing target sequence comprises a mutation in intron 4 of the FANCC gene compared to a wild type FANCC gene. In some embodiments, the editing target sequence comprises a mutation that is located between positions 95,171,933 and 95,172,133 of human chromosome 9. In some embodiments, the editing target sequence comprises a mutation that encodes a nucleotide substitution compared to a wild type FANCC gene as set forth in SEQ ID NO: 3809. In some embodiments, the editing target sequence comprises a nucleotide transversion relative to a wild type FANCC gene set forth as SEQ ID NO: 3809. In some embodiments, the editing target sequence comprises an A to T transversion at position 95,172,033 in human chromosome 9 (a c.456+4A->T (IVS4+4A>T) mutation) as compared to a wild type FANCC gene.

[0440] In some embodiments, the editing target sequence comprises a mutation in exon 1 of the FANCC gene as compared to a wild type FANCC gene. In some embodiments, the editing target sequence comprises a mutation that is located between positions 95,249,125 and 95,249,325 of human chromosome 9. In some embodiments, the editing target sequence comprises a mutation that results in a frameshift in a transcript encoded by the FANCC gene as compared to a transcript encoded by a wild type FANCC gene. In some embodiments, the editing target sequence comprises a mutation that is a deletion compared to a wild type FANCC gene set forth as SEQ ID NO: 3809. In some embodiments, the editing target sequence comprises a deletion of a nucleotide guanine at position 95,249,225 in human chromosome 9 (a c.67del or 322delG mutation) as compared to a wild type FANCC gene.

[0441] In some embodiments, the prime editing method comprises contacting a target FANCC gene with a prime editing composition comprising a prime editor, a PEgRNA, and/or a ngRNA. In some embodiments, contacting the target FANCC gene with the prime editing composition results in incorporation of one or more intended nucleotide edits in the target FANCC gene. In some embodiments, the incorporation is in a region of the target FANCC gene that corresponds to an editing target sequence in the FANCC gene. In some embodiments, the one or more intended nucleotide edits comprises a single nucleotide substitution, an insertion, a deletion, or any combination thereof, compared to the endogenous sequence of the target FANCC gene. In some embodiments, incorporation of the one or more intended nucleotide edits results in replacement of one or more mutations with the corresponding sequence that encodes a wild type FANCC polypeptide. In some embodiments, incorporation of the one or more intended nucleotide edits results in replacement of the one or more mutations with the corresponding sequence in a wild type FANCC gene. In some embodiments, incorporation of the one more intended nucleotide edits results in correction of a mutation in the target FANCC gene. In some embodiments, the target FANCC gene comprises an editing template sequence that contains the mutation. In some embodiments, contacting the target FANCC gene with the prime editing composition results in incorporation of one or more intended nucleotide edits in the target FANCC gene, which corrects the mutation in the editing target sequence (or a double stranded region comprising the editing target sequence and the complementary sequence to the editing target sequence on a target strand) in the target FANCC gene.

[0442] In some embodiments, incorporation of the one more intended nucleotide edits results in correction of a mutation in intron 4 of the target FANCC gene as compared to a wild type FANCC gene. In some embodiments, incorporation of the one more intended nucleotide edits results in correction of a mutation located between 95,171,933 and 95,172,133 of human chromosome 9. In some embodiments, incorporation of the one more intended nucleotide edits results in correction of a IVS4+4 A->T mutation. In some embodiments, incorporation of the one or more intended nucleotide edits results in a T to A nucleotide substitution (on the sense strand) in the FANCC gene at a position corresponding to position 95,172,033 of human chromosome 9. In some embodiments, incorporation of the one more intended nucleotide edits results in correction of a FANCC gene sequence that encodes a FANCC transcript that lacks exon 4 compared to a wild type FANCC mRNA, and restores wild type expression and function of the FANCC protein.

[0443] In some embodiments, incorporation of the one more intended nucleotide edits results in correction of a mutation in exon 1 of the target FANCC gene as compared to a wild type FANCC gene. In some embodiments, incorporation of the one more intended nucleotide edits results in correction of a mutation located between positions 95,249,125 and 95,249,325 of human chromosome 9. In some embodiments, incorporation of the one more intended nucleotide edits results in correction of a mutation that encodes a c.67del (322delG) nucleotide mutation. In some embodiments, incorporation of the one more intended nucleotide edits results in a nucleotide insertion at a position corresponding to position 95,248,225 in human chromosome 9. In some embodiments, incorporation of the one more intended nucleotide edits results in an insertion of nucleotide Cytidine (on the sense strand) in the FANCC gene. In some embodiments, incorporation of the one more intended nucleotide edits results in correction of an FANCC gene sequence that encodes a c.67del (322delG) nucleotide mutation, and restores wild type expression and function of the FANCC protein.

[0444] In some embodiments, the target FANCC gene is in a target cell. Accordingly, in one aspect provided herein is a method of editing a target cell comprising a target FANCC gene that encodes a polypeptide that comprises one or more mutations relative to a wild type FANCC gene. In some embodiments, the methods of the present disclosure comprise introducing a prime editing composition comprising a PEgRNA, a prime editor polypeptide, and/or a ngRNA into the target cell that has the target FANCC gene to edit the target FANCC gene, thereby generating an edited cell. In some embodiments, the target cell is a mammalian cell. In some embodiments, the target cell is a human cell. In some embodiments, the target cell is a primary cell. In some embodiments, the target cell is a human primary cell. In some embodiments, the target cell is a progenitor cell. In some embodiments, the target cell is a human progenitor cell. In some embodiments, the target cell is a stem cell. In some embodiments, the target cell is a human stem cell. In some embodiments, the target cell is a HSC. In some embodiments, the target cell is a human HSC. In some embodiments, the target cell is a HSPC. In some embodiments, the target cell is a CD34+ cell. In some embodiments, the target cell is a human HSPC. In some embodiments, the target cell is a human CD34+ cell. In some embodiments, the target cell is a human HSPC. In some embodiments, the target cell is a human cell. In some embodiments, the target cell is an embryonic stem cell. In some embodiments, the target cell is a primary human hair cell derived from an induced human pluripotent stem cell (iPSC). In some embodiments, the target cell is a differentiated cell derived from an induced human pluripotent stem cell (iPSC). In some embodiments, the cell is a differentiated cell derived from a hematopoietic stem cell. In some embodiments, the cell is a CD34+ cell. In some embodiments, the cell is a hematopoietic stem cell (HSC). In some embodiments, the cell is a hematopoietic progenitor cell (HPC). In some embodiments, hematopoietic stem cells and hematopoietic progenitor cells are referred to as hematopoietic stem or progenitor cells (HSPCs). In some embodiments, the cell is a human HSC. In some embodiments, the cell is a human HPC. In some embodiments, the cell is a human HSPC. In some embodiments, the cell is a long term (LT)-HSC. In some embodiments, the cell is a short-term(ST)-HSC. In some embodiments, the cell is a myeloid progenitor cell. In some embodiments, the cell is a multipotent progenitor cell (MPP). In some embodiments, the cell is a lymphoid progenitor cell. In some embodiments, the cell is a granulocyte monocyte progenitor cell. In some embodiments, the cell is a megakaryocyte erythroid progenitor cell.

[0445] In some embodiments, components of a prime editing composition described herein are provided to a target cell in vitro. In some embodiments, components of a prime editing composition described herein are provided to a target cell ex vivo. In some embodiments, components of a prime editing composition described herein are provided to a target cell in vivo. In some embodiments, the cell edited by prime editing can be differentiated into, or give rise to recovery of a population of cells. In some embodiments, the target cell is an ex vivo cell. In some embodiments, the target cell is an ex vivo cell obtained from a human subject. In some embodiments, the target cell is in a subject, e.g., a human subject.

[0446] In some embodiments, incorporation of the one or more intended nucleotide edits in the target FANCC gene that comprises one or more mutations restores wild type expression and function of the FANCC protein encoded by the FANCC gene. In some embodiments, the target FANCC gene comprises a frameshifting mutation, e.g., a c.67del (322delG) mutation compared to a wild type FANCC gene prior to incorporation of the one or more intended nucleotide edits. In some embodiments, the target FANCC gene comprises a mutation that results in aberrant splicing of the FANCC mRNA, e.g., a c.456+4A->T (IVS4+4A>T) mutation compared to a wild type FANCC gene. In some embodiments, expression and/or function of the FANCC protein may be measured when expressed in a target cell. In some embodiments, incorporation of the one or more intended nucleotide edits in the target FANCC gene comprising one or more mutations lead to a fold change in a level of FANCC gene expression, FANCC protein expression, or a combination thereof. In some embodiments, a change in the level of FANCC expression level can comprise a fold change of, e.g., 2-fold, 3-fold, 4-fold, 5-fold, 6-fold, 7-fold, 8-fold, 9-fold, 10-fold, 15-fold, 20-fold, 25-fold, 30-fold, 40-fold, 50-fold, 60-fold, 70-fold, 80-fold, 90-fold, 100-fold or greater as compared to expression in a suitable control cell not introduced with a prime editing composition described herein. In some embodiments, incorporation of the one or more intended nucleotide edits in the target FANCC gene that comprises one or more mutations restores wild type expression of the FANCC protein by at least 10%, 20%, 30%, 40%, 50%, 60%, 70%, 80%, 90%, 95%, 99% or more as compared to wild type expression of the FANCC protein in a suitable control cell that comprises a wild type FANCC gene.

[0447] In some embodiments, a FANCC expression increase can be measured by a functional assay. In some embodiments, protein expression can be measured using a protein assay. In some embodiments, protein expression can be measured using antibody testing. In some embodiments, an antibody can comprise anti-FANCC. In some embodiments, protein expression can be measured using ELISA, mass spectrometry, Western blot, sodium dodecyl sulfate polyacrylamide gel electrophoresis (SDS-PAGE), high performance liquid chromatography (HPLC), electrophoresis, or any combination thereof. In some embodiments, a protein assay can comprise SDS-PAGE and densitometric analysis of a Coomassie Blue-stained gel.

### Methods of Treating Fanconi Anemia of Complementation Group C (FA-C)

[0448] In some embodiments, provided herein are methods for treatment of a subject diagnosed with a disease associated with or caused by one or more pathogenic mutations. In some embodiments, provided herein are methods for treatment of a subject diagnosed with a disease associated with or caused by one or more pathogenic mutations that can be corrected by prime editing. In some embodiments, methods of treatment provided herein comprises editing one or more genes other than the gene that harbors the one or more pathogenic mutations. In some embodiments, provided herein are methods for treating Fanconi anemia of complementation group C (FA-C) that comprise administering to a subject a therapeutically effective amount of a prime editing composition, or a pharmaceutical composition comprising a prime editing composition as described herein. In some embodiments, administration of the prime editing composition results in incorporation of one or more intended nucleotide edits in the target gene in the subject. In some embodiments, administration of the prime editing composition results in correction of one or more pathogenic mutations, e.g. point mutations, insertions, or deletions, associated with Fanconi anemia of complementation group C (FA-C) in the subject. In some embodiments, the target gene (e.g., target FANCC gene) comprise an editing target sequence that contains the pathogenic mutation. In some embodiments, administration of the prime editing composition results in incorporation of one or more intended nucleotide edits in the target gene (e.g., target FANCC gene) that corrects the pathogenic mutation in the editing target sequence (or a double stranded region comprising the editing target sequence and the complementary sequence to the editing target sequence on a target strand) of the target gene in the subject.

[0449] In some embodiments, the method provided herein comprises administering to a subject an effective amount of a prime editing composition, for example, a PEgRNA, a prime editor, and/or a ngRNA. In some embodiments, the method comprises administering to the subject an effective amount of a prime editing composition described herein, for example, polynucleotides, vectors, or constructs that encode prime editing composition components, or RNPs, LNPs, and/or polypeptides comprising prime editing composition components. Prime editing compositions can be administered to target the FANCC gene in a subject, e.g., a human subject, suffering from, having, susceptible to, or at risk for Fanconi anemia of complementation group C (FA-C). Identifying a subject in need of such treatment can be in the judgment of a subject or a health care professional and can be subjective (e.g. opinion) or objective (e.g. measurable by a test or diagnostic method). In some embodiments, the subject has Fanconi anemia of complementation group C (FA-C). In some embodiments, the subject has a mutation in the FANCC gene.

[0450] In some embodiments, the subject has been diagnosed with Fanconi anemia by sequencing of a FANCC gene in the subject. In some embodiments, the subject comprises at least a copy of FANCC gene that comprises one or more mutations compared to a wild type FANCC gene. In some embodiments, the subject comprises at least a copy of FANCC gene that comprises a mutation in a coding region of the FANCC gene. In some embodiments, the subject comprises at least a copy of FANCC gene that comprises a mutation in exon 1 as compared to a wild type FANCC gene. In some embodiments, the subject comprises at least a copy of FANCC gene that comprises a c.67del (322delG) mutation as compared to a wild type FANCC gene. In some embodiments, the subject comprises at two copies of FANCC gene that comprises a c.67del (322delG) mutation as compared to a wild type FANCC gene.

[0451] In some embodiments, the subject comprises at least a copy of FANCC gene that comprises a mutation in an intron as compared to a wild type FANCC gene. In some embodiments, the subject comprises at least a copy of FANCC gene that comprises a mutation in intron 4 as compared to a wild type FANCC gene. In some embodiments, the subject comprises at least a copy of a target FANCC gene that comprises a c.456+4A->T (IVS4+4A>T) and c.67del (322delG) mutation relative to the wild-type FANCC gene. In some embodiments, the subject comprises two copies of a target FANCC gene that comprises a c.456+4A->T (IVS4+4A>T) and c.67del (322delG) mutation relative to the wild-type FANCC gene.

[0452] In some embodiments, the method comprises directly administering prime editing compositions provided herein to a subject. The prime editing compositions described herein can be delivered with in any form as described herein, e.g., as LNPs, RNPs, polynucleotide vectors such as viral vectors, or mRNAs. The prime editing compositions can be formulated with any pharmaceutically acceptable carrier described herein or known in the art for administering directly to a subject. Components of a prime editing composition or a pharmaceutical composition thereof may be administered to the subject simultaneously or sequentially. For example, in some embodiments, the method comprises administering a prime editing composition, or pharmaceutical composition thereof, comprising a complex that comprises a prime editor fusion protein and a PEgRNA and/or a ngRNA, to a subject. In some embodiments, the method comprises administering a polynucleotide or vector encoding a prime editor to a subject simultaneously with a PEgRNA and/or a ngRNA. In some embodiments, the method comprises administering a polynucleotide or vector encoding a prime editor to a subject before administration with a PEgRNA and/or a ngRNA.

[0453] In some embodiments, a population of patients each having one or more mutations in the FANCC gene may be treated with a prime editing composition (e.g., a PEgRNA, a prime editor, and optionally an ngRNA as described herein) disclosed herein.

[0454] In some embodiments, a patient with multiple mutations in the FANCC gene can be treated with a prime editing composition (e.g., a PEgRNAs, a prime editor, and optionally an ngRNA as described herein). For example, in some embodiments, a subject may comprise two copies of the gene, each comprising one or more different mutations. In some embodiments, a patient with one or more different mutations in the target gene can be treated with a prime editing composition comprising a PEgRNAs, a prime editor, and optionally an ngRNA. In some embodiments, the editing template may comprise one or more synonymous mutations relative to the wild-type FANCC gene. Such synonymous mutations may include, for example, mutations that decrease the ability of a PEgRNA to rebind to the same target sequence once the desired edit is installed in the genome (e.g., synonymous mutations that silence the endogenous PAM sequence or that edit the endogenous protospacer). Accordingly, one or more synonymous mutations may include a PAM silencing edit.

[0455] Suitable routes of administrating the prime editing compositions to a subject include, without limitation: topical, subcutaneous, transdermal, intradermal, intralesional, intraarticular, intraperitoneal, intravesical, transmucosal, gingival, intradental, intracochlear, transtympanic, intraorgan, epidural, intrathecal, intramuscular, intravenous, intravascular, intraosseus, periocular, intratumoral, intracerebral, and intracerebroventricular administration. In some embodiments, the compositions described are administered intraperitoneally, intravenously, or by direct injection or direct infusion. In some embodiments, the compositions described are administered by direct injection or infusion or transfusion, transplantation (e.g., allogeneic hematopoietic stem cell transplantation (HSCT) using cells that have been contacted with a prime editing complex as described herein) to a subject. In some embodiments, the compositions described herein are administered to a subject by injection, by means of a catheter, by means of a suppository, or by means of an implant. In some embodiments, the compositions described herein are administered by direct injection.

[0456] In some embodiments, the method comprises administering cells edited with a prime editing composition described herein to a subject. In some embodiments, the cells are allogeneic. In some embodiments, allogeneic cells are or have been contacted ex vivo with a prime editing composition or pharmaceutical composition thereof and are introduced into a human subject in need thereof. In some embodiments, the cells are autologous to the subject. In some embodiments, cells are removed from a subject and contacted ex vivo with a prime editing composition or pharmaceutical composition thereof and are re-introduced into the subject.

[0457] In some embodiments, cells are contacted ex vivo with one or more components of a prime editing composition. In some embodiments, the ex vivo-contacted cells are introduced into the subject, and the subject is administered in vivo with one or more components of a prime editing composition. For example, in some embodiments, cells are contacted ex vivo with a prime editor and introduced into a subject. In some embodiments, the subject is then administered with a PEgRNA and/or a ngRNA, or a polynucleotide encoding the PEgRNA and/or the ngRNA.

[0458] In some embodiments, cells contacted with the prime editing composition are determined for incorporation of the one or more intended nucleotide edits in the genome before re-introduction into the subject. In some embodiments, the cells are enriched for incorporation of the one or more intended nucleotide edits in the genome before re-introduction into the subject. In some embodiments, the edited cells are primary cells. In some embodiments, the edited cells are progenitor cells. In some embodiments, the edited cells are stem cells. In some embodiments, the edited cells are HSPCs. In some embodiments, the edited cells are induced pluripotent stem cells. In some embodiments, the edited cells are primary human cells. In some embodiments, the edited cells are human progenitor cells. In some embodiments, the edited cells are human stem cells. In some embodiments, the edited cells are human HSPCs. In some embodiments, the edited cells are human CD34+ HSPCs. The prime editing composition or components thereof may be introduced into a cell by any delivery approaches as described herein, including LNP administration, RNP administration, electroporation, nucleofection, transfection, viral transduction, microinjection, cell membrane disruption and diffusion, or any other approach known in the art.

[0459] The cells edited with prime editing can be introduced into the subject by any route known in the art. In some embodiments, the edited cells are administered to a subject by direct infusion. In some embodiments, the edited cells are administered to a subject by intravenous infusion. In some embodiments, the edited cells are administered to a subject as implants.

[0460] The pharmaceutical compositions, prime editing compositions, and cells, as described herein, can be administered in effective amounts. In some embodiments, the effective amount depends upon the mode of administration. In some embodiments, the effective amount depends upon the stage of the condition, the age and physical condition of the subject, the nature of concurrent therapy, if any, and like factors well-known to the medical practitioner.

[0461] The specific dose administered can be a uniform dose for each subject. Alternatively, a subject's dose can be tailored to the approximate body weight of the subject. Other factors in determining the appropriate dosage can include the disease or condition to be treated or prevented, the severity of the disease, the route of administration, and the age, sex and medical condition of the patient.

[0462] In embodiments wherein components of a prime editing composition are administered sequentially, the time between sequential administration can be at least 1 hour, at least 2 hours, at least 6 hours, at least 12 hours, at least 24 hours, at least 36 hours, at least 48 hours, at least 3 days, at least 4 days, at least 5 days, at least 7 days, at least 10 days, or at least 14 days.

[0463] In some embodiments, a method of monitoring treatment progress is provided. In some embodiments, the method includes the step of determining a level of diagnostic marker, for example, correction of a mutation in FANCC gene, or diagnostic measurement associated with Fanconi anemia (e.g., Cytometric flow analysis) in a subject suffering from Fanconi anemia symptoms and has been administered an effective amount of a prime editing composition described herein. The level of the diagnostic marker determined in the method can be compared to known levels of the marker in either healthy normal controls or in other afflicted subjects to establish the subject's disease status.

### Delivery

[0464] Prime editing compositions described herein can be delivered to a cellular environment with any approach known in the art. Components of a prime editing composition can be delivered to a cell by the same mode or different modes. For example, in some embodiments, a prime editor can be delivered as a polypeptide or a polynucleotide (DNA or RNA) encoding the polypeptide. In some embodiments, a PEgRNA can be delivered directly as an RNA or as a DNA encoding the PEgRNA.

[0465] In some embodiments, a prime editing composition component is encoded by a polynucleotide, a vector, or a construct. In some embodiments, a prime editor polypeptide, a PEgRNA and/or a ngRNA is encoded by a polynucleotide. In some embodiments, the polynucleotide encodes a prime editor fusion protein comprising a DNA binding domain and a DNA polymerase domain. In some embodiments, the polynucleotide encodes a DNA polymerase domain of a prime editor. In some embodiments, the polynucleotide encodes a DNA polymerase domain of a prime editor. In some embodiments, the polynucleotide encodes a portion of a prime editor protein, for example, a N-terminal portion of a prime editor fusion protein connected to an intein-N. In some embodiments, the polynucleotide encodes a portion of a prime editor protein, for example, a C-terminal portion of a prime editor fusion protein connected to an intein-C. In some embodiments, the polynucleotide encodes a PEgRNA and/or a ngRNA. In some embodiments, the polypeptide encodes two or more components of a prime editing composition, for example, a prime editor fusion protein and a PEgRNA.

[0466] In some embodiments, the polynucleotide encoding one or more prime editing composition components is delivered to a target cell is integrated into the genome of the cell for long-term expression, for example, by a retroviral vector. In some embodiments, the polynucleotide delivered to a target cell is expressed transiently. For example, the polynucleotide may be delivered in the form of a mRNA, or a non-integrating vector (non-integrating virus, plasmids, minicircle DNAs) for episomal expression.

[0467] In some embodiments, a polynucleotide encoding one or more prime editing system components can be operably linked to a regulatory element, e.g., a transcriptional control element, such as a promoter. In some embodiments, the polynucleotide is operably linked to multiple control elements. Depending on the expression system utilized, any of a number of suitable transcription and translation control elements, including constitutive and inducible promoters, transcription enhancer elements, transcription terminators, etc. may be used in the expression vector (e.g., U6 promoter, H1 promoter).

[0468] In some embodiments, the polynucleotide encoding one or more prime editing composition components is a part of, or is encoded by, a vector. In some embodiments, the vector is a viral vector. In some embodiments, the vector is a non-viral vector.

[0469] Non-viral vector delivery systems can include DNA plasmids, RNA (e.g., a transcript of a vector described herein), naked nucleic acid, and nucleic acid complexed with a delivery vehicle, such as a liposome. In some embodiments, the polynucleotide is provided as an RNA, e.g., a mRNA or a transcript. Any RNA of the prime editing systems, for example a guide RNA or a base editor-encoding mRNA, can be delivered in the form of RNA. In some embodiments, one or more components of the prime editing system that are RNAs is produced by direct chemical synthesis or may be transcribed in vitro from a DNA. In some embodiments, a mRNA that encodes a prime editor polypeptide is generated using in vitro transcription. Guide polynucleotides (e.g., PEgRNA or ngRNA) can also be transcribed using in vitro transcription from a cassette containing a T7 promoter, followed by the sequence “GG”, and guide polynucleotide sequence. In some embodiments, the prime editor encoding mRNA, PEgRNA, and/or ngRNA are synthesized in vitro using an RNA polymerase enzyme (e.g., T7 polymerase, T3 polymerase, SP6 polymerase, etc.). Once synthesized, the RNA can directly contact a target FANCC gene or can be introduced into a cell using any suitable technique for introducing nucleic acids into cells (e.g., microinjection, electroporation, transfection). In some embodiments, the prime editor-coding sequences, the PEgRNAs, and/or the ngRNAs are modified to include one or more modified nucleoside e.g. using pseudo-U or 5-Methyl-C.

[0470] Methods of non-viral delivery of nucleic acids can include lipofection, electroporation, nucleofection, microinjection, biolistics, virosomes, liposomes, immunoliposomes, polycation or lipid:nucleic acid conjugates, nanoparticles, cell penetrating peptides and associated conjugated molecules and chemistry, naked DNA, artificial virions, cell membrane disruption by a microfluidics device, and agent-enhanced uptake of DNA. Cationic and neutral lipids that are suitable for efficient receptor-recognition lipofection of polynucleotides can be used. Delivery can be to cells (e.g., in vitro or ex vivo administration) or target tissues (e.g., in vivo administration). The preparation of lipid:nucleic acid complexes, including targeted liposomes such as immunolipid complexes, can be used.

[0471] Viral vector delivery systems can include DNA and RNA viruses, which can have either episomal or integrated genomes after delivery to the cell. RNA or DNA viral based systems can be used to target specific cells and trafficking the viral payload to an organelle of the cell. Viral vectors can be administered directly (in vivo) or they can be used to treat cells in vitro, and the modified cells can optionally be administered after delivery (ex vivo).

[0472] In some embodiments, the viral vector is a retroviral, lentiviral, adenoviral, adeno-associated viral or herpes simplex viral vector. Retroviral vectors can include those based upon murine leukemia virus (MuLV), gibbon ape leukemia virus (GaLV), simian immunodeficiency virus (SIV), human immunodeficiency virus (HIV), and combinations thereof. In some embodiments, the retroviral vector is a lentiviral vector. In some embodiments, the retroviral vector is a gamma retroviral vector. In some embodiments, the viral vector is an adenoviral vector. In some embodiments, the viral vector is an adeno-associated virus (“AAV”) vector.

[0473] In some embodiments, polynucleotides encoding one or more prime editing composition components are packaged in a virus particle. Packaging cells can be used to form virus particles that can infect a target cell. Such cells can include 293 cells, (e.g., for packaging adenovirus), and W2 cells or PA317 cells (e.g., for packaging retrovirus). Viral vectors can be generated by producing a cell line that packages a nucleic acid vector into a viral particle. The vectors can contain the minimal viral sequences required for packaging and subsequent integration into a host. The vectors can contain other viral sequences being replaced by an expression cassette for the polynucleotide(s) to be expressed. The missing viral functions can be supplied in trans by the packaging cell line. For example, AAV vectors can comprise ITR sequences from the AAV genome which are required for packaging and integration into the host genome. In some embodiment, the polynucleotides are a DNA polynucleotide. In some embodiment, the polynucleotides are an RNA polynucleotide, e.g., an mRNA polynucleotide.

[0474] In some embodiments, the AAV vector is selected for tropism to a particular cell, tissue, organism. In some embodiments, the AAV vector is pseudotyped, e.g., AAV5/8. In some embodiments, polynucleotides encoding one or more prime editing composition components are packaged in a first AAV and a second AAV. In some embodiments, the polynucleotides encoding one or more prime editing composition components are packaged in a first rAAV and a second rAAV.

[0475] In some embodiments, dual AAV vectors are generated by splitting a large transgene expression cassette in two separate halves (5′ and 3′ ends that encode N-terminal portion and C-terminal portion of, e.g., a prime editor polypeptide), where each half of the cassette is no more than 5 kb in length, optionally no more than 4.7 kb in length, and is packaged in a single AAV vector. In some embodiments, the full-length transgene expression cassette is reassembled upon co-infection of the same cell by both dual AAV vectors. In some embodiments, a portion or fragment of a prime editor polypeptide, e.g. a Cas9 nickase, is fused to an intein. The portion or fragment of the polypeptide can be fused to the N-terminus or the C-terminus of the intein. In some embodiments, a N-terminal portion of the polypeptide is fused to an intein-N, and a C-terminal portion of the polypeptide is separately fused to an intein-C. In some embodiments, a portion or fragment of a prime editor fusion protein is fused to an intein and fused to an AAV capsid protein. In some embodiments, intein-N may be fused to the N-terminal portion of a first domain described herein, and intein-C may be fused to the C-terminal portion of a second domain described herein for the joining of the N-terminal portion to the C-terminal portion, thereby joining the first and second domains. In some embodiments, the first and second domains are each independently chosen from a DNA binding domain or a DNA polymerase domain. The intein, nuclease and capsid protein can be fused together in any arrangement (e.g., nuclease-intein-capsid, intein-nuclease-capsid, capsid-intein-nuclease, etc.). In some embodiments, a polynucleotide encoding a prime editor fusion protein is split in two separate halves, each encoding a portion of the prime editor fusion protein and separately fused to an intein. In some embodiments, each of the two halves of the polynucleotide is packaged in an individual AAV vector of a dual AAV vector system. In some embodiments, each of the two halves of the polynucleotide is no more than 5 kb in length, optionally no more than 4.7 kb in length. In some embodiments, the full-length prime editor fusion protein is reassembled upon co-infection of the same cell by both dual AAV vectors, expression of both halves of the prime editor fusion protein, and self-excision of the inteins. In some embodiments, the in vivo use of dual AAV vectors results in the expression of full-length full-length prime editor fusion proteins. In some embodiments, the use of the dual AAV vector platform allows viable delivery of transgenes of greater than about 4.5, 4.6, 4.7, 4.8, 4.9, or 5.0 kb in size.

[0476] In some embodiments, an intein is inserted at a splice site within a Cas protein. In some embodiments, insertion of an intein disrupts a Cas activity. As used herein, “intein” refers to a self-splicing protein intron (e.g., peptide), e.g., which ligates flanking N-terminal and C-terminal exteins (e.g., fragments to be joined). In some embodiments, an intein may comprise a polypeptide that is able to excise itself and join exteins with a peptide bond (e.g., protein splicing). In some embodiments, an intein of a precursor gene comes from two genes (e.g., split intein). In some embodiments, an intein may be a synthetic intein. Non-limiting examples of intein pairs that may be used in accordance with the present disclosure include: dnaE-n and dnaE-c. a 4-hydroxytamoxifen (4-HT)-responsive intein, an iCas molecule, a Ssp DnaX intein, Ter DnaE3 intein, Ter ThyX intein, Rma DnaB intein, Cfa DnaE intein, Ssp GyrB intein, and Rma DnaB intein. In some embodiments, intein fragments may be fused to the N terminal and C-terminal portion of a split Cas protein respectively for joining the fragments of split Cas9.

[0477] In some embodiments, the split Cas9 system may be used in general to bypass the packing limit of the viral delivery vehicles. In some embodiments, a split Cas9 may be a Type II CRISPR system Cas9. In some embodiments, a first nucleic acid encodes a first portion of the Cas9 protein having a first split-intein and wherein the second nucleic acid encodes a second portion of the Cas9 protein having a second split-intein complementary to the first split-intein and wherein the first portion of the Cas9 protein and the second portion of the Cas9 protein are joined together to form the Cas9 protein. In some embodiments, the first portion of the Cas9 protein is the N-terminal fragment of the Cas9 protein and the second portion of the Cas9 protein is the C-terminal fragment of the Cas9 protein. In some embodiments, a split site may be selected which are surface exposed due to the sterical need for protein splicing.

[0478] In some embodiments, a Cas protein may be split into two fragments at any C, T, A, or S. In some embodiments, a Cas9 may be intein split at residues 203-204, 280-292, 292-364, 311-325, 417-438, 445-483, 468-469, 481-502, 513-520, 522-530, 565-637, 696-707, 713-714, 795-804, 803-810, 878-887, and 1153-1154. In some embodiments, protein is divided into two fragments at SpCas9 T310, T313, A456, S469, or C574. In some embodiments, split Cas9 fragments across different split pairs yield combinations that provided the complete polypeptide sequence activate gene expression even when fragments are partially redundant. In some embodiments, a functional Cas9 protein may be reconstituted from two inactive split-Cas9 peptides in the presence of gRNA by using a split-intein protein splicing strategy. In some embodiment, the split Cas9 fragments are fused to either a N-terminal intein fragment or a C-terminal intein fragment, which can associate with each other and catalytically splice the two split Cas9 fragments into a functional reconstituted Cas9 protein. In some embodiments, a split-Cas9 can be packaged into self-complementary AAV. In some embodiments, a split-Cas9 comprises a 2.5 kb and a 2.2 kb fragment of S. pyogenes Cas9 coding sequences.

[0479] In some embodiments, a split-Cas9 architecture reduces the length and/or size of the coding sequences of a viral vector, e.g., AAV.

[0480] A target cell can be transiently or non-transiently transfected with one or more vectors described herein. A cell can be transfected as it naturally occurs in a subject. A cell can be taken or derived from a subject and transfected. A cell can be derived from cells taken from a subject, such as a cell line. In some embodiments, a cell transfected with one or more vectors described herein can be used to establish a new cell line comprising one or more vector-derived sequences. In some embodiments, a cell transiently transfected with the compositions of the disclosure (such as by transient transfection of one or more vectors, or transfection with RNA), and modified through the activity of a prime editor, can be used to establish a new cell line comprising cells containing the modification but lacking any other exogenous sequence. Any suitable vector compatible with the host cell can be used with the methods of the disclosure. Non-limiting examples of vectors include pXT1, pSG5, pSVK3, pBPV, pMSG, and pSVLSV40.

[0481] In some embodiments, a prime editor protein can be provided to cells as a polypeptide. In some embodiments, the prime editor protein is fused to a polypeptide domain that increases solubility of the protein. In some embodiments, the prime editor protein is formulated to improve solubility of the protein.

[0482] In some embodiment, a prime editor polypeptide is fused to a polypeptide permeant domain to promote uptake by the cell. In some embodiments, the permeant domain is a including peptide, a peptidomimetic, or a non-peptide carrier. For example, a permeant peptide may be derived from the third alpha helix of Drosophila melanogaster transcription factor Antennapedia, referred to as penetratin, which comprises the amino acid sequence RQIKIWFQNRRMKWKK (SEQ ID. NO: 3806). As another example, the permeant peptide can comprise the HIV-1 tat basic region amino acid sequence, which may include, for example, amino acids 49-57 of naturally-occurring tat protein. Other permeant domains can include poly-arginine motifs, for example, the region of amino acids 34-56 of HIV-1 rev protein, nona-arginine (SEQ ID NO: 3823), and octa-arginine (SEQ ID NO: 3824). The nona-arginine (R9) sequence (SEQ ID NO: 3823) can be used. The site at which the fusion can be made may be selected in order to optimize the biological activity, secretion or binding characteristics of the polypeptide.

[0483] In some embodiments, a prime editor polypeptide is produced in vitro or by host cells, and it may be further processed by unfolding, e.g., heat denaturation, DTT reduction, etc. and may be further refolded. In some embodiments, a prime editor polypeptide is prepared by in vitro synthesis. Various commercial synthetic apparatuses can be used. By using synthesizers, naturally occurring amino acids can be substituted with unnatural amino acids. In some embodiments, a prime editor polypeptide is isolated and purified in accordance with recombinant synthesis methods, for example, by expression in a host cell and the lysate purified using HPLC, exclusion chromatography, gel electrophoresis, affinity chromatography, or other purification technique.

[0484] In some embodiments, a prime editing composition, for example, prime editor polypeptide components and PEgRNA/ngRNA are introduced to a target cell by nanoparticles. In some embodiments, the prime editor polypeptide components and the PEgRNA and/or ngRNA form a complex in the nanoparticle. Any suitable nanoparticle design can be used to deliver genome editing system components or nucleic acids encoding such components. In some embodiments, the nanoparticle is inorganic. In some embodiments, the nanoparticle is organic. In some embodiments, a prime editing composition is delivered to a target cell, e.g., a HSPC, in an organic nanoparticle, e.g., a lipid nanoparticle (LNP) or polymer nanoparticle.

[0485] In some embodiments, LNPs are formulated from cationic, anionic, neutral lipids, or combinations thereof. In some embodiments, neutral lipids, such as the fusogenic phospholipid DOPE or the membrane component cholesterol, are included to enhance transfection activity and nanoparticle stability. In some embodiments, LNPs are formulated with hydrophobic lipids, hydrophilic lipids, or combinations thereof. Lipids may be formulated in a wide range of molar ratios to produce an LNP. Any lipid or combination of lipids that are known in the art can be used to produce an LNP. Exemplary lipids used to produce LNPs are provided in Table 59 below.

[0486] In some embodiments, components of a prime editing composition form a complex prior to delivery to a target cell. For example, a prime editor fusion protein, a PEgRNA, and/or a ngRNA can for a complex prior to delivery to the target cell. In some embodiments, a prime editing polypeptide (e.g. a prime editor fusion protein) and a guide polynucleotide (e.g. a PEgRNA or ngRNA) form a ribonucleoprotein (RNP) for delivery to a target cell. In some embodiments, the RNP comprises a prime editor fusion protein in complex with a PEgRNA. RNPs may be delivered to cells using known methods, such as electroporation, nucleofection, or cationic lipid-mediated methods, or any other approaches known in the art. In some embodiments, delivery of a prime editing composition or complex to the target cell does not require the delivery of foreign DNA into the cell. In some embodiments, the RNP comprising the prime editing complex is degraded over time in the target cell. Exemplary lipids for use in nanoparticle formulations and/or gene transfer are shown in Table 59 below.

TABLE 59
Exemplary lipids for nanoparticle formulation or gene transfer

| Lipid | Abbreviation | Feature |
|---|---|---|
| 1,2-Dioleoyl-sn-glycero-3-phosphatidylcholine | DOPC | Helper |
| 1,2-Dioleoyl-sn-glycero-3-phosphatidylethanolamine | DOPE | Helper |
| Cholesterol | | Helper |
| N41-(2,3-Dioleyloxy)prophyliN,N,N-trimethylammonium | DOTMA | Cationic |
| chloride | | |
| 1,2-Dioleoyloxy-3-trimethylammonium-propane | DOGS | Cationic |
| Dioctadecylamidoglycylspermine | | |
| N-(3-Aminopropy 1)-N,N-dimethy 1-2,3-bis(dodecyloxy)-1- | GAP-DLRIE | Cationic |
| propanaminium bromide | | |
| Cetyltrimethylammonium bromide | CTAB | Cationic |
| 6-Lauroxyhexyl omithinate | LHON | Cationic |
| 1-(2,3-Dioleoyloxypropy 1)-2,4,6-trimethylpyridinium | 20c | Cationic |
| 2,3-Dioleyloxy-N-P(spenninecarboxamido-ethy 1J-N,Ndimethyl- | DOSPA | Cationic |
| 1-propanatninium trifluoroacetate | | |
| 1,2-Dioley 1-3-trimethylamtnonium-propane | DOPA | Cationic |
| N-(2-Hydroxyethyl)-N,N-dimethy 1-2,3-bis(tetradecyloxy)-1- | MDRIE | Cationic |
| propanaminium bromide | | |
| Dimyristooxypropyl dimethyl hydroxyethyl ammonium bromide | DMRI | Cationic |
| 3β-[N-(N′, N′-Dimethylaminoethane)-carbamoyl]cholesterol | DC-Chol | Cationic |
| Bis-guanidium-tren-cholesterol | BGTC | Cationic |
| 1,3-Diodeoxy-2-(6-carboxy-spermy 1)-propylamide | DOSPER | Cationic |
| Dimethyloctadecylammonium bromide | DDAB | Cationic |
| Dioctadecylamidoglicylspermidin | DSL | Cationic |
| rac-[(2,3-Dioctadecyloxypropyl)(2-hydroxyethyl)]- | CLIP-1 | Cationic |
| dimethylammonium chloride | | |
| rac-[2(2,3-Dihexadecyloxypropyloxymethyloxy) | CLIP-6 | Cationic |
| ethyl]trimethylammoniun bromide | | |
| Ethyldimyristoylphosphatidylcholine | EDMPC | Cationic |
| 1,2-Distearyloxy-N,N-dimethyl-3-aminopropane | DSDMA | Cationic |
| 1,2-Dimyristoyl-trimethylammonium propane | DMTAP | Cationic |
| O,O′-Dimyristyl-N-lysyl aspartate | DMKE | Cationic |
| 1,2-Distearoyl-sn-glycero-3-ethylpho sphocholine | DSEPC | Cationic |
| N-Palmitoyl D-erythro-sphingosyl carbamoyl-spenmine | CCS | Cationic |
| N-t-Butyl-N0-tetradecyl-3-tetradecylaminopropionamidine | diC14-amidine | Cationic |
| Octadecenolyoxy[ethyl-2-heptadecenyl-3 hydroxyethyl] | DOTIM | Cationic |
| imidazolinium chloride | | |
| N1-Cholesteryloxycarbonyl-3,7-diazanonane-1,9-diamine | CDAN | Cationic |
| 2-(3-Bis(3-amino-propy 1)-amino]propylamino)- | RPR209120 | Cationic |
| Nditetradecylcarbamoylme-ethyl-acetamide | | |
| 1,2-dilinoleyloxy-3-dimethylaminopropane | DLinDMA | Cationic |
| 2,2-dilinoley 1-4-dimethylaminoethyl-[1,3]-dioxolane | DLin-KC2- | Cationic |
| | DMA | |
| dilinoleyl-methyl-4-dimethylaminobutyrate | DLin-MC3- | Cationic |
| | DMA | |

[0487] Exemplary polymers for use in nanoparticle formulations and/or gene transfer are shown in Table

TABLE 60
Exemplary lipids for nanoparticle formulation or gene transfer

| Polymer | Abbreviation |
|---|---|
| Poly (ethylene)glycol | PEG |
| Polyethylenimine | PEI |
| Dithiobis (succinimidylpropionate) | DSP |
| Dimethyl-3,3′-dithiobispropionimidate | DTBP |
| Poly(ethylene imine)biscarbamate | PEIC |
| Poly (L-lysine) | PLL |
| Histidine modified PLL | |
| Poly (N-vinylpyrrolidone) | PVP |
| Poly (propylenimine) | PPI |
| Poly (amidoamine) | PAMAM |
| Poly (amidoethylenimine) | SS PAEI |
| Triethylenetetramine | TETA |
| Poly (β-aminoester) | |
| Poly(4-hydroxy-L-proline ester) | PHP |
| Poly (allylamine) | |
| Poly(a-[4-aminobutyl]-L-glycolic acid) | PAGA |
| Poly(D,L-lactic-co-glycolic acid) | PLGA |
| Poly (N-ethyl-4-vinylpyridinium bromide) | |
| Poly (phosphazene)s | PPZ |
| Poly (phosphoester)s | PPE |
| Poly (phosphoramidate)s | PPA |
| Poly (N-2-hydroxypropylmethacrylamide) | pHPMA |
| Poly (2-(dimethylamino)ethyl methacrylate) | pDMAEMA |
| Poly (2-aminoethyl propylene phosphate) | PPE-EA |
| Chitosan | |
| Galactosylated chitosan | |
| N-dodacylated chitosam | |
| Histone | |
| Collagen | |
| Dextran-spermine | D-SPM |

[0488] Exemplary delivery methods for polynucleotides encoding prime editing composition components are shown in Table 6l below.

TABLE 61
Exemplary polynucleotide delivery methods

| | | Delivery into | | | Type of |
|---|---|---|---|---|---|
| | | Non-Dividing | Duration of | Genome | Molecule |
| Delivery | Vector/Mode | Cells | Expression | Integration | Delivered |
| Physical | (e.g., | YES | Transient | NO | Nucleic Acids |
| | electroporation, | | | | and Proteins |
| | particle gun, | | | | |
| | Calcium phosphate | | | | |
| | transfection) | | | | |
| Viral | Retrovirus | NO | Stable | YES | RNA |
| | Lentivirus | YES | Stable | YES/NO with | RNA |
| | | | | modification | |
| | Adenovirus | YES | Transient | NO | DNA |
| | Adeno-Associated | YES | Stable | NO | DNA |
| | Virus (AAV) | | | | |
| | Vaccinia Virus | YES | Very Transient | NO | DNA |
| | Herpes Simplex | YES | Stable | NO | DNA |
| | Virus | | | | |
| Non-Viral | Cationic | YES | Transient | Depends on | Nucleic acids |
| | | | | what is | and Proteins |
| | | | | delivered | |
| | Polymeric | YES | Transient | NO | Nucleic Acids |
| | Nanoparticles | | | | |
| Biological | Attenuated Bacteria | YES | Transient | NO | Nucleic Acids |
| Non-Viral | Engineered | YES | Transient | NO | Nucleic Acids |
| | Bacteriophages | | | | |
| Delivery | Mammalian Virus- | YES | Transient | NO | Nucleic Acids |
| | like Particles | | | | |
| Vehicles | Biological | YES | Transient | NO | Nucleic Acids |
| | liposomes: | | | | |
| | Erythrocyte Ghosts | | | | |
| | and Exosomes | | | | |

[0489] The prime editing compositions of the disclosure, whether introduced as polynucleotides or polypeptides, can be provided to the cells for about 30 minutes to about 24 hours, e.g., 1 hour, 1.5 hours, 2 hours, 2.5 hours, 3 hours, 3.5 hours 4 hours, 5 hours, 6 hours, 7 hours, 8 hours, 12 hours, 16 hours, 18 hours, 20 hours, or any other period from about 30 minutes to about 24 hours, which can be repeated with a frequency of about every day to about every 4 days, e.g., every 1.5 days, every 2 days, every 3 days, or any other frequency from about every day to about every four days. The compositions may be provided to the subject cells one or more times, e.g., one time, twice, three times, or more than three times, and the cells allowed to incubate with the agent(s) for some amount of time following each contacting event e.g., 16-24 hours. In cases in which two or more different prime editing system components, e.g. two different polynucleotide constructs are provided to the cell (e.g., different components of the same prime editing system, or two different guide nucleic acids that are complementary to different sequences within the same or different target genes), the compositions may be delivered simultaneously (e.g., as two polypeptides and/or nucleic acids). Alternatively, they may be provided sequentially, e.g., one composition being provided first, followed by a second composition.

[0490] The prime editing compositions and pharmaceutical compositions of the disclosure, whether introduced as polynucleotides or polypeptides, can be administered to subjects in need thereof for about 30 minutes to about 24 hours, e.g., 1 hour, 1.5 hours, 2 hours, 2.5 hours, 3 hours, 3.5 hours 4 hours, 5 hours, 6 hours, 7 hours, 8 hours, 12 hours, 16 hours, 18 hours, 20 hours, or any other period from about 30 minutes to about 24 hours, which can be repeated with a frequency of about every day to about every 4 days, e.g., every 1.5 days, every 2 days, every 3 days, or any other frequency from about every day to about every four days. The compositions may be provided to the subject one or more times, e.g., one time, twice, three times, or more than three times. In cases in which two or more different prime editing system components, e.g. two different polynucleotide constructs are administered to the subject (e.g., different components of the same prime editing system, or two different guide nucleic acids that are complementary to different sequences within the same or different target genes), the compositions may be administered simultaneously (e.g., as two polypeptides and/or nucleic acids). Alternatively, they may be provided sequentially, e.g., one composition being provided first, followed by a second composition.

[0491] Exemplary nucleotide sequence of wild type FANCC is provided in SEQ ID NO: 3809. Exemplary coding sequence for FANCC protein is provided in SEQ ID NO: 3810. Exemplary FANCC Coding Sequence (SEQ ID NO: 3810)

ATGGCTCAAGATTCAGTAGATCTTTCTTGTGATTATCAGTTTTGGATGC
AGAAGCTTTCTGTATGGGATCAGGCTTCCACTTTGGAAACCCAGCAAGA
CACCTGTCTTCACGTGGCTCAGTTCCAGGAGTTCCTAAGGAAGATGTAT
GAAGCCTTGAAAGAGATGGATTCTAATACAGTCATTGAAAGATTCCCCA
CAATTGGTCAACTGTTGGCAAAAGCTTGTTGGAATCCTTTTATTTTAGC
ATATGATGAAAGCCAAAAAATTCTAATATGGTGCTTATGTTGTCTAATT
AACAAAGAACCACAGAATTCTGGACAATCAAAACTTAACTCCTGGATAC
AGGGTGTATTATCTCATATACTTTCAGCACTCAGATTTGATAAAGAAGT
TGCTCTTTTCACTCAAGGTCTTGGGTATGCACCTATAGATTACTATCCT
GGTTTGCTTAAAAATATGGTTTTATCATTAGCGTCTGAACTCAGAGAGA
ATCATCTTAATGGATTTAACACTCAAAGGCGAATGGCTCCCGAGCGAGT
GGCGTCCCTGTCACGAGTTTGTGTCCCACTTATTACCCTGACAGATGTT
GACCCCCTGGTGGAGGCTCTCCTCATCTGTCATGGACGTGAACCTCAGG
AAATCCTCCAGCCAGAGTTCTTTGAGGCTGTAAACGAGGCCATTTTGCT
GAAGAAGATTTCTCTCCCCATGTCAGCTGTAGTCTGCCTCTGGCTTCGG
CACCTTCCCAGCCTTGAAAAAGCAATGCTGCATCTTTTTGAAAAGCTAA
TCTCCAGTGAGAGAAATTGTCTGAGAAGGATCGAATGCTTTATAAAAGA
TTCATCGCTGCCTCAAGCAGCCTGCCACCCTGCCATATTCCGGGTTGTT
GATGAGATGTTCAGGTGTGCACTCCTGGAAACCGATGGGGCCCTGGAAA
TCATAGCCACTATTCAGGTGTTTACGCAGTGCTTTGTAGAAGCTCTGGA
GAAAGCAAGCAAGCAGCTGCGGTTTGCACTCAAGACCTACTTTCCTTAC
ACTTCTCCATCTCTTGCCATGGTGCTGCTGCAAGACCCTCAAGATATCC
CTCGGGGACACTGGCTCCAGACACTGAAGCATATTTCTGAACTGCTCAG
AGAAGCAGTTGAAGACCAGACTCATGGGTCCTGCGGAGGTCCCTTTGAG
AGCTGGTTCCTGTTCATTCACTTCGGAGGATGGGCTGAGATGGTGGCAG
AGCAATTACTGATGTCGGCAGCCGAACCCCCCACGGCCCTGCTGTGGCT
CTTGGCCTTCTACTACGGCCCCCGTGATGGGAGGCAGCAGAGAGCACAG
ACTATGGTCCAGGTGAAGGCCGTGCTGGGCCACCTCCTGGCAATGTCCA
GAAGCAGCAGCCTCTCAGCCCAGGACCTGCAGACGGTAGCAGGACAGGG
CACAGACACAGACCTCAGAGCTCCTGCACAACAGCTGATCAGGCACCTT
CTCCTCAACTTCCTGCTCTGGGCTCCTGGAGGCCACACGATCGCCTGGG
ATGTCATCACCCTGATGGCTCACACTGCTGAGATAACTCACGAGATCAT
TGGCTTTCTTGACCAGACCTTGTACAGATGGAATCGTCTTGGCATTGAA
AGCCCTAGATCAGAAAAACTGGCCCGAGAGCTCCTTAAAGAGCTGCGAA
CTCAAGTCTAG

[0492] Exemplary Wild type FANCC nucleotide sequence (SEQ ID NO: 3809)

>NG_011707.1 Homo sapiens FA complementation group C (FANCC),
RefSeqGene (LRG_497) on chromosome 9
CTGCTTTCTCTCAACTCTAAAATACTTAGATCTGTGTCTTTCACACAGCGTATAGGCTTTGTGCTTTATG
CTTTGTAGTGATTGGGTTGAGAACATGCTTCTGCTAAATACAGCATGTTGATATTTGAAAACATGGCAGA
AGCTGGAAAGTCACTCTCACCTTCCCTCCTCTCCTTTCTCCTGATGCGGGTCATAAAACCTTGGAATGAT
TTTCTGAACTTCCCCTGAAGCAGGTCCTAAGACCCTCATGTAAGAAGTGCTGCCTATATCCACAGTACCT
ATCTCCACAGGAAAGGTACTTTCTTACCTCTGAAGACTGACGGGTTACAGAGAAAAATCTGAACAAATAA
GCCTTGCTAAATTCCCCCCAAGTTTATTCCCATCTTTGTTCAACTGTATCTCCCCACAACTGTCCACTCT
TCATGAAACCTGGCATAGAAACACACAAGTTTAACAGCTTCTCTGGGTCTTCCTTTCCTTAGGAAGGCTC
CTATGTCATGGGAAACTTACATGCAATGTCTATGCTTTGCTCCTGTTAATCTTTTATTATGGAGGCCTCA
GCCATGAACCTAGGATGGGTACAGAAAAGCCATTTTTCATTCCCTATAGTAATCTCGCAATAGGTATCTA
TTGATTAATTTATCAAATAGGCTCAGCCAAAGTGCGAATGCCCAGTGACACAATGAAGAGCTGCCACCTC
CAGGTTCTTAGTCAGGGCTTGCTTTGCAGTGAGGGAGAGAAACTCACTGAAGTCAGCATAGGTAAAGGGA
TGACTGTTGCAAGGATATGGGGCAATCCTGTGGACAACTAAGAACAGAAAAAATATATAGTCAGTTAACC
TTAAAATTAGGCTTAAAAATAAAAAATAAGGAATGGAAGCTCCCCTCTCTCTCACAGAATAAATAACAGC
CTTTCAACGTCATTTTGCTTTTCTCTGCCAGCCAACTTTCTTTGCTACTTACATATTTTTCTTCCCCAAG
TAACTCCAGTTGGCATGAGGGCTTTAGCTCCTGTTGTATAGAGATGTTACAGTCTCTCAGTGTTGCAATT
CCAAATTCCCCAGCAATAGTTTGATTGGTTCAGCTAGGGTCAGGCTACCATCTCTGGTTCAATTAGCTGT
GGCTAGTAATGGAGGCTCTAGTACAAACATGTCCTCCTAGGTGCATTCTTTCAGCAGAGCCTAGGGAGTG
AGCATATCGGGGGCAGGGTAGAAGTGGCAGCTTCCATGCAGCATTTATAATACATTTCCCTTTTTCCATG
AATTTCCATCTCCTGCAGCCATCCCTTTCTTGGCCTTTTCCCCTTCACGGTGGCAGATCAAAGCCCTTCA
CTATTATCTGCTCCGTTTCTTAAAGTGTTTCTGGCACAAAAAATATTCTCATTGTTCTCTTCTCTAGTTC
AACTTACATTTCCTCAGTTGGAATGTTTTAATGGGAAAGTAATGTGGTGATTAGAGTGCAGAAGCCTCTG
GGATCACCTCACCCTATTTTCAAGTCACCAGCCTGGGCCAGGAGCAAGAACATTATAAGTAAGAGGCCAC
TGTAAATGGAGTTGAAGCCAGGTTCCACCCTCCACTAGAAGAGATGGCTCTGTGCATGAGTTTCTGTATC
TGTGAAAGTGGAATATTACCACTGTGGATTACATAAGATCACTGTGAGAATCAAAGGGAATAACCCAGGC
CAAGGAGTTAGCCCAGTGCCTGGAACTTCAACACGCATTATTCACAACTGAGGTACAAGAGGCAAATATC
AAAGCCATGGACAAGATAGTGTTAAGGGCGTGATGGCATGTGCCTGTAATCCCAGCTACTCATGAGGCTG
AAGCATGAGAATTGCTTGAACCGGTGAGGCAAAGGTTGCAGTGAGCTGAGCTGAGATCATGCTACTGCAC
TCCAGCCTGGGCGACTGAGTGAGACTCTGTCTCAAAAAAAAAAAAAAAAAAAAGAAAAGATAATGTTAAA
TGTTGGGGTGCCAAATAAGGACTGGAAACCAGGTGGGTGGTGTCTGAACTAATTCTGGAAGTAGGAGTCT
TGGTACAATGGTTTCCACAACGTGGATTCTAAGACAGTTGATTCTATTTGTTGAACTTTGAAGGAAGGTT
TGATAATGTCAGGAACTTTGCAGCACTCAGCCAATTGACTTGTTTTCCTCTAGAATGTAAAGATTTAATG
TAAACGATGTAATAATTTTCACCTAAATAGGCCATTTTTCATTTTGCGACATTATTTGTGATTGGGTTCT
ATACTACAACCAAAACTGTGTTCCAGAGTAACACACACCTGGGCCCGGTGGCCCACGCCTGTAATTCCAG
CATTTTGGTGCCACTGAGGTGGTTGGATTGCTTAAGCGCAGAGGTCGAGGCTGCAGTGAGCTGTGTTTGC
ACCACTGCACTTCAGCCTGGGTGAGAGTGAGATGCAGTCTCAAAACAAACAAATCAAAACCACACACACA
CACACACACACTCCCACACACAAACAAAAATTGGATCACCCATAATCAATTTTATGATTCAATTAAAAAG
AGGGTTTGTATTGAAATATCTGTTTCTCTGGAAACTTTCTGGGCATTTTACAAAGTGAACATCTCACTAT
TGCTTAAAATATTATTAAGATAGTTCCATGTATATGAATGCCAGGCAAAATGAATCCCTATAAATATAAG
TTTGGATCTTTATGCTATATATGCTTCCTATTTAGGTCTAATTTAGGCCTAAACATGGTGTCATTTCATA
TACTGCAAAGTTGGATGAGCCTAGCAATTCTTTATTAACCACTGAACTAAAAAGACAGAAAACTGGGATA
TGGCAAGACATCAATCATTAACAAACACTAAAAATGATTTTTCAGCGAATATGTAAAAGGATGTGGGTAC
CAAAATAGATAATTTCTCTCAAGAAATACATACTTTAATTGCTTTCTTTGCTGATAAATGCAGAACTTAA
ACGTCAACTCACTCTCGATTTGTTACCACAGAGGTGACTTTCTCATGGTCAAGGTGCCACGATGAGTGCC
CCTCAGGCATGTATTTCCCTACCCAGGACTTGCTTTTGATTTATCCATGTCACACTATGCACACATCAAA
AACACATCGACCTCTCTGCTGTAAAACAGAACGAAATCATGTCCTTTGCAGCAACATGGATGGAGCTGGA
GGACATTATCCTAAGTGAACAAACTCAGAAACAGAAAATCAAATATTGCATGTTCTCATAAGCGGGAGCT
AAACAATAGGTATACATGTACATAAGAATGGGAATAACAAGACACTGGGGACTCCAAAAAGGGAGAGGGT
GGGAAGGGGGTGAGGGCTGAAAAATTAGCTATTGGGTACAATGTTCAATGTTTGGGGGACAGGTACACCA
GAAGCCCAATCCCCACCATTACACAATATACCTATGTAACAAGCAAGCACATGTACCCCCGAATCTAAAA
TTAAAAAACAATCAAAAAGCACCGACTTCCTTAACTGGCATGGAATAGTTTCGAGAATGGATGTAAACAC
CGAATTCCTTAATGTAGTTGCAGATTCTGCCAGTTTTGTCTCAACCTCTGGATCGGTTCCTTTTTTTAAC
TACCTTTAATTCTTAAACAGATTGTTGCTATTGCTATGCTATATACTTATTGTATCACTTATAAATGTAT
AACCTCTGCAAATTAGTCTCTGAATTGAAAGTATTCATTGGTAAAACGGGTATTTCTTCACCATAGGAAT
AGTTGGACATGTTTAAATACTTGAGAGCTATTTTTATTACAAGCACACACAGCTTTGTGGTGTTTTTTGT
TGAGACAGAGTCTCGCTCTGTTGCCCAGGCTGGAGTGCAGTAGTGCGATCTTGGCTTACTGCAACCTTCG
CCTCCTGGGTTCAAGCAATTCTCCTGCCTCAGCCTCCTAAGTAGCCGGGAGTACACACTAATTTTTGTAT
TTTTAGTAGAGACGGGTTTTTGCCATGTTGGCCAGGCTGGTCTCAAACTCTTGACCTCAGGTGATCCACC
CGCCTCAGCTTCCCAAAGTGCTGGGATTAGAGGTGTGAGCCACCGCGCCCGGCCTGTAGTGTGTTTTTGA
ACGTATATGTGAAGTTGTAGCTTTTTTTTTTTTTTTTTTGAGACGGAGTCTCCCTCTGTCGCCAGGCTGG
AGTGCAGTGGCGCGATCTCGGCTCACTGCAACCTCTGACTCCCTGGTTCAAGCTATTCTGCCTCAGCCTC
CAGAGTAGCTGAGATTACAGGCGCCCGCCACCGCGCCCGGTTAAACGTTTTGTATTTTTAGTAGAGACGG
CGTTTCACCATGTTGGCCAGAATGGTCTCGATCTTCTGACCTCGTGATCCGCCCGCCTTGGCCTTCCAAA
GTGCTGGGATTACAGGCCTGAGACACAGCGCCCGACCTAAGCTGTAGTTTTATGATTATGATTTATGGTT
GTGAGGCATTGATTTAAGACATTTTAAAGCTTAAGTCGTCAGATCCTAGAAGAAAAAAAAATTCACCAAG
ACAAGCTAATGCCATTGTCATAAATGGGAGTTTGGAGAAAATTTTATTAATATTTGTTTGGGTGGTTTAT
GTACAGCGTTGAACTGATTTGAACCCCGACCAAACACTGTATGGAACTAATGTACGGTAGGGGAAATCAT
TAACTGAAGATGCCTTTTTTGTTGCTATTGTTTAGAACGCAGTTAGAAAATCTTATTTTAGAGGTTTTAC
CCCGTTGACAAAGCCTCAACTTTTCTTCAAAAGAACTAATTTCCATTTTACCTCCCCTACATTTTGAACA
GAATATGGAAGAAGCCAGCGCCCCTTCTCCGCGGGCGCTGCTGCAACCCTGCTCCCGCCGGGGCTTCCGC
GCGAAACCGGGAACACTGGAGCAGTACCGACTCCGCTCGCCTAGAACCCGCCCCAGCCGGGCCCACTTCC
GCCAGAGCCCTGGCCGCGCCCGCCCCGCCCCACGGACCCGAGATTCGTCGGAATTTTCCCGCGACGCCGC
GGGAGCGCGCGGGGCCGCTAGCCAGGCCCCAGAATGCACTGCTGACACGTGTGCGCGCGCGCGGCTCCAC
TGCCGGGCGACCGCGGGAAAATTCCAAAAAAACTCAAAAAGCCAATACGAGGCAAAGCCAAATTTTCAAG
CCACAGATCCCGGGCGGTGGCTTCCTTTCCGCCACTGCCCAAACTGCTGAAGCAGCTCCCGCGAGGACCA
CCCGGTAAGCGGCAGGCCGCAGAACGCAGCGAGGGCGGAGGCTTCCCTCGGGGGTCTGGCCGACACGTCA
GCGGCGAGAGCGGGAGGAGGAGGCGAGGGGCAAGAGGGAAGGCTCGCGAGAGCGGGTGGGCCAGGCGCGC
CTTGCGGTGGGCGAGAGGGGTTCCCGCCGGCGCAGGGCTGTGGCTAAGGCTGAGGCGGGAGGCGGGAGGC
GGGAGGCGGAAGGTGGCGGGCGGTGCCAGCCCGCGGGGGGGGGCCAGGGCGGGGAAAGCGGGGGCGGGAG
CCGGCGCTGGGGTCGCGCGGAAGGGAGCCCCCGGAGAGGCGGGAGCCGGGTGTTGGCGTTTTGGTTCTTT
TTGTTCATTGAGCGCAGGCAGCTATGTCTTCTTCAAAGGAGAGGAGCAAAGGTGAATTTCTCTGCCTCGG
ACTCGTGGGAGCCGTGAAAAGCTCGCCCCTTTGAGCCGGTCGCCCTCTACAGCTGGCCTCGTCCTCCCCG
TCCCTCACACCCCTGCCCCCAAACCCCATTCGCCGGGGCGCCAGGAGGGGCGAGGTCCAATTAGAGGAGC
CCGGGGCGCGGCTGTTACCCCTCCCGCCCTCCGCCTTTTATTCCCGGAGGGAGGCGGGTTCGCAGAGGCC
AGTGTCTTCCCTCCATTCTTTTTGTGGACGCCAGGCCATATCTTCAAAGCCCGTGAGAGATTTTTCAGGT
GCTGTTTGTTGGTTTGCTCTTTTTAATTTTTTAGGTGGGTGCGTTTACAACTACGAACCCTCTATGATCT
TATGTGTCCAGCGCACCGAATGGGGGAAAAGACTTGGAGTTTTATAACATGGGAAATTGGGTACCAGAAT
CTTAAGGGAAGAGACCAAGGAGTTTTCTAGCAAAGTCCTGTATGTGCCTGGACTTTTGTTCTAATCTGAA
ACTTGGAAAACTCCCGGGCATCTGATTTTATTCTAACTTGTGCCCCATTTAATGCATCTAAACTGTGATG
TGATTTGACTTAGCATTTATCAAATGAGCAGAGCACTTTTGGGCCACCCAACTTCAGCTCTTTGTGGCTG
TCACTCACTGTCAGTGATATGCCCTCAGACAGATCGTTTTCTCCTTACTCCCCTGAAAGGTTGTTACAAA
CAGTAGAATTCATACCATGTGTTGAGATCATTCATTACCTAAGCTTAGATGGAAAACATGTTCATTGCGA
CTTTATACATTAAACTTGAATTGATGTTTCAATGTTATGTGCTGTACCAGAGTCACCTGGAAATAAGCAC
TCATATACATTATTCATATACAAGAAAGGCTGCATCGAAAAAGAATTTGTTTTCCTAGATATATCAGAGA
TCTTTTTCACCAACCCACTACTCCCAGTAATAGAGCCTGCTTCTTGAGAACTGGACTAATTATACTTTGT
ATATTATACATTCGAATTTATTTTTGCTTTATTCGGTCATATTTTCTCTTGATTTCTCCAAAAACGTTTA
CCAAGGCATCAGAAAAGAAAAGCAGGCTCTATATTGGTATTTTTTGTTTTGTCCTCTAATAAAAAGCATT
AACTTGATTGATTGGCTGGTTGTGGAAGATGTGTTGCTGCATGTATGTGCAACTGTGCATGTACATTTTA
AAACAAATGGTACTTTTAACCAGTTCCATATTTCAGCAGGTAGTTCCAATAACAATTATACAAATTTCGT
GTTTATGAGAACCAGCTACAGGGAGGCCAGCCTGGCCAGTAGAAAGTTGGATTGATTATCTGGGCCATGG
AGAGAGCCAGAGGAAACTCACATGAGTGGTAGTTCCAAGTTGGTAGTGTTAGGGCCTCAAATCGGGCTGG
AAATGAGCACCAAATGATTTTTAAAAGTTTTATTTTAGGCTGGGATATGTGCATTCTCTGTCTTGTTTGT
GGATCTTGAGTGATTGACTTAATGTGAAAAAATACATACAGGAGAAGCACCTTGGAAGTTTTGCAATGTT
TTAATAAAAATGCAGAAGTGGAGAAGGAAAGGCAATTCAGATAACAGGCAGAGCATGGTGGCTTATGCCT
GTAATCCCAGCACTTTGGGAAGCGGAGGCGGAAGGATCACTTGATCCCAGGAGTTCGAGTCCAGCGTGGG
CAACAGAGAGAGCCCTGTCTCTACAAAAAGTTAAGAAATTAGCCGGCCATAGTGATGCGGGGCTGTGGTC
CCAGTTACTCGGGAGGCTGAGGTGGAGGATCACCTGAGTTCAGGAGGTCGAGGCCACAGTGAACTGTGAT
TGCGCCACTGCACTCCACACTGGGCAGCAGACTGAGACCGTGTCTGGAAAAATAAAATTGGTAACAATTC
AGATTGGCCACCAGAGTTGGACTGGGGGCTAGCAGGCAATGGTTTTACCTCCATTTTGAGATTGGCATCT
TCTAACTCAAGTTTAATACGGGACTGAGGGTAAGAGACCTGCATGCCTTTTATGTCAGCATTACATTATC
TTGATTATGGCAGCTTTATAGTAAGTTTTGAAATTAAGTAGTGTAAGTTATCCAATGTTTTTCTTCATTT
TCAAAATTGTTTTGGCGGTTCAGGGTTCCTTACATTTCCATATAAATTTTAGTATCAGTTTGTTATTTTT
TTTCAGAAAACCGTGCTGTGATAGACTTTGTAGGAATTGCATTTAATTTTGCATATCTATTTGGGGGAGA
ATTGCCATCTCATCATGAACATGGAATCTCTTTCCATTTGTTGAGCGCTTTAATTTCTCTTAGCAGTATT
TAGTAATTTTCAGTGTACAAATTTTGCCCTTTTGTAAATTAATTTTGAAGTTTTATTTTTGATGGTATTG
TGAATTGAATTATTTTTAAAATTTCATTAAAATTTTTTTTATCGATAAAGTGAAAGCAAGTTTTTTGTTT
TTTTTTTGAGACAGAGTCTCGCTCTGTTTGCCCAGACTGGAGTGCAGTGGCACGATCTCGGCTCACTGCA
ATCTCCGCCTCCCGGGTTCAAGCGATTCTTCTGCCTCAGCCTCCCGAGTAGCTGGGACTACAGGCACCCT
TCACCACGCCCGGCTAATTTTTGTATTTTTAGTAGAGACGGGGTTTCACCATATTGGTCAGGCTGGTCTC
AAACTCCTGACCTCGTGACCCGCCTGCCTCGGCCTCCCAAAGTGCTGGGATTACAGGCGTGAGTCACTGC
GCCCGGCCGAAAGCAAGTTTATTAAGAAAGCAAAGGAATAAAGAATGGCTACTCCACAGGTAGAGCAGCC
GAATTATTTTTAAAATTTCATTATGGATTGTTGTCAGTATATAAACATACACTTGATTTCACTTATTAAT
CTTATATCTTGCAACCTTCCTTGTTGAACTTGATGATTACTTCCAGTTTTTTGTGAATTACACAGGATTT
TCTACATACGGCATCATGCCAATATAGTTTTACTTTTCTTTCCATGTGGATGCCTTTAGTTTCTTTTTTG
CCTGATTAATTTTTTTCTTACCTGGTTCGACCCTCCAGCACTTTGCTGAATAGACATGGAGTGTATATTA
TTGACTTATTTCTCATCTTAGGGGGAAAACATTTAATCTTTTACCATTAGATACGACGTTAGCTGTAAGT
TTTTCATAAATGCACTTTATCAGGTTGAGAGATTTTCCTTCTGTTACTAGATTGTTGAGAATTCTTATGA
ACAAATGTTAGAAATGTTGCTTTTCTGCATCTATTGAGATGACTGTGGTTTTGTTCCTTTATCAATATGA
TTTATTAACTGATTTGTGTATTTATACTAACCTTGCATTCTAAATCCCATTTAGTCATGTTATATAATCC
TTTTTACATATTGCTGGATTTGGCTTAGTAATATTTTGTTTAGGATTTTTGTATTATGTTCATGGTAATA
TTAGTAATATTTTGTCTTGTGATGTCTGTCTGGCTTTGGTATTACCGTAATAGTGGCATCTTAGAATGAG
TTGGGAAGTGTTCCCTCCTATTTTTTCAGAGTTTGTGAAGGATTGGTATTTTTTTTTCTTCAAATATTTG
ATAGAATTCACTCACAAAGTCATCAGTTCGTGGATATTTCTTTATAGGGAAATTTGAAATTACAAATTCA
GGTTCTCCAGCGCACGCATGCGTGTGACTTCTCCGGTGAAGGTTGTCGTGCGCGCACCTGGCCGTGACTC
CTCCAGAGCGAGGTTGTGCACACATGCGCGCGCCTTCTCCATCGCCAGCTTCCACATACTTTCTCCAGCA
CTGGTTCCCAGGCACACACGTGACGCTTCTCCAGGGCGGAGCTCCCATAGTGTGTGCGGCTTTCTAGCGC
TCACTCTTGGTGGGTGTGCTTTGCCAGCGCTAGCTCCCTGGGGTGTGCCGCTTCCCCAACGCTGGCTCCC
GTGCTTGGGTGCCGCCCCAGCACCTGTTCCCAGGCGTGTGCACGTCTCCAGCGCTAGGTCCTTGGCATAT
GTGCTTCTGCAGCGCCGGCTTCTGTGGTGTGTATCTTCCCCAGTGCAGGCTCTTGTAGTGCGCTGTGATC
AGCTGCACCCAATGGTCAACTGTGTACCTCAGCATCCCCCTCAGGCGATTTTGTAACTGAGCCTGTGGTG
GGACACCTCCCTGTGAACACTTTTCCTGGCGCCCTAGAGGATGGGTTTCTGGCAAGTTACCAAAGGTGGT
TTTCCAGCAAGTTGTACTGGTACAGCACCCACAGAGACATCTCTCGTATTCAGTGAGCCATGGCTGTGCT
CCCTCCAAAAAGTTCTTGATCCCATTTCTGGGAAGAAGTGGGTATTTTTCCTTAGGGCACCCACCTCAGC
CCTAGGGGCAGTGGCTCCTCCTTATATCTCCTATTCCTGTGTTTTGTAGAATTCTCTGTACTTCTTACTA
GCCAGCACCTTGTTACTCCAGTCCTGTTACAGTGAATAGTTCTTGACTGGGCATGGTGACTTATGCCTGT
AATCCCAGCACTTTGCGAGGCCGCAGGGCTTGGGAGAATTACTTGAGACTAGGAGTTTGAGACAAGCCTG
GGCAACATAGCAAAACCCCTGTTCTACAGAAAACACGAAATTATCTGGGAGTGGTGTGTGTCCCACCTAC
TACGGAGGCTGATGTGGGAGGATCGTTGAGCCCAGGAGGTTGAGGCTGCTTGGAGCCATGATTATACCAT
TGCATTCCAGCCTGGGCAACAGAGTGAGACCCTCTCTCTAAAAAAGAAAATGACAACAACAACAGTAATT
ATTTATAGTTGACTTTCCTTATTCAAATTATTATGTGGTTTCTTTTTACTGACTGGACCCAGACTGATTT
ATCACCTTTGCTCTGAACTTCCTCAAGAAATCATGAGTGGTGAGAGTATTTAGTCTGTTCATTTTCTTGA
ATTGTGAAAGTTAATCCTAAGGTTTCTCCCACTTCCACATGACGAAAGACACGTTTGTGTGAGAGTATGT
AGGCTTTTATGAAGTGATGAAACTGCCTTTCCATGCCTTTGCAAATTAGAAACAGTATAGATTATCATGG
AAAGTGGGGTCAGAGATTAGGAGGGGAGGAGAAGAGGACAGGATTAGAACTGTGGTCGACCTTATGGCAT
CCAGTGGGCAGGGTTCCCAGATGACCTGACTTTAGATGTGACTGTACTTCTCATTATCTTTCACCCCTGT
TTTTCATTTTTCAGATTTCTGGGACTTGTGTTTTCATTTTCCTCTAGAGCCCCAATGATGCTTTTGTAAT
TCAGAAACATTTATGTGTGATATAAACATTTTATATACATTTAGCTATTTTAGTGGAATCTGAGATCTGT
TACTCTGGTGACTACCCATAAGACAGTTTGAGGCTGCGGTTTTTCACACACACACACACACACACACACA
CACACACACAGATTCAGAGGAGACTATTTAAACAATATGAATTTGGCTGGGTGCAGTGCTGTGCACCTGT
AGTCCCAACTATTTGAGAGGCTGAGGCTGGAAGATTGTGAGTTCAAGTCTCCTGGGCAAAATTGTGAGAC
CCTATCTCCAGGGAAAAAAATAAATAAATAAAAGGCTATGACTTTATGTCTGTGATTCCTTCTTTACCTG
GTTCAGTTCAAAGGTATGGAATTGCCAGACACTTTTGCTTCTTTTATAAGATTTTGGAGGTGCCATTTAC
CTTAGTGACTTCCAACACCCTCCTATGGCTGGTTCCTTTTTGTTGTCATTTTGTTTTTGTTGGTTGTTAC
TGTTTACTTAAAGCTATAACATTATAAGGCATTGTACTTAGCCTAATCCTATTTTTGTAATTATGCTTGT
ACATTCAAGTGCTGTACTCAATAGATTTCCTTATTAACTCCTGATTTTTTTTTTTTTTTTTTTTTTGAGA
CGGAATCTCACTCTGTCTCCCGGGCTGGAGTGCAGTGGCGCGATCTCGGCTCATTGCAAGCTCTGCCTCC
CGGGTTCACACCATTCTCCTCCTGAGTAGCTGGGACTACAGGAGCCCACCACCACGCCCAGCTAATTTTT
TGTATTTTTGTTAGAGGCGGAGTTTCACCGTGTTAGCCAGGATGGTCTTGATCTCCTGACCTCGTGATCC
GCCTGCCTTGGCCTCCCAAAGTGCTGGGATTACAGGCGTGAGCCACCGCTCCTGGCCAACGCCTGATTTA
TTGATGACCATTTGTGGTTATGCATAATGACTTTTCCTCTGTCTTTGTGCACTGCAGTTCATATTATTGC
CTTATGTGTATATGCTTGTTTCCACAACTCTTAGCCAACTTCTTCAGGGTATATTCTTTTTTATTATATA
ACTGCATTGATGTTTGTTGAGTGCCAACATCCTTTCCTCCCTTCTCTGTCATAACAGACCCTAGATTTTC
TTTTAGTAGTCACTATTCTATGGGCTCTGGGGAACACTGATACTACCTCTAGCTCCTGGGGGTGGACTTT
TATTGGTTTAAGGAGTGTGTTTTATTGATTCGTCACAGTCATTGGTTAAGGATGGGCATAAGCTCAAGCA
AGTCCAGTCTGAATACATCTGAGGTCTGTCTCTTACTTGGGATGCTGGAACAGAAGTATGTACTCTATTT
TTGGGTGGTATGGATGTGATGTGACTTCTGTAATGGCTAAAGCTGTTTTGCTATCATGAGGGAAGCAGGA
TGGAGAGACAGATCAACTGTGAAGTCTGCCCTGTTTCTGGACTTGCCAGTTTCTTGAACCAACGAATTCC
CCCCCTCCTTTTTTTTTTTTCTCTTTTGAAACAGGGTCTTGCCCTGTCAACCAGGAGTGCAGTGGCACGA
ACATAGCTCACTGCAGCCTCAAACTCCTGGGCTCCAGGAATCATGCCACCTCAGCCACCTGAGTAACTAG
GACTACAGGTATGCACCACAATGTCTGGCTAATTAATTATCATTATTTTTGTAGAGACAGAGTCATGCTA
TGTTACCTAGGCTGGTCTTGAACTCCCAGCCTCAAGCTGTCCTCCTGCCTGGGTCTCCCAAAGTGCTGTG
ATGAGAGGTGTGAGCCACCATGCCTGGCCTCCCATTATTGTTTTAGCTGGTTTTGCTTGGTGCAGCAGGG
GCATTTAATGCTTACTAAATATTTAGATCTTCCCTCACATTTCCCAGTTCACTTGCAGCTAGGTAGGACA
TTGTGATTGTTCTAGCCAATAGATTTTAAGCAGGTTATTTCCAGGTAGAAGCATTTAGTAGCAGATTCCT
GACCTAGCTATCTCTTCTTTTTGCAATGGTGATTCTGGAGGCTAGGTGTTGAGATGTCTGAGCACCTGTC
ATGCTGGATCCATGAGTGACTGTGGAGCAGAACAACACCCCCACCCCACAAACATGTGTGTCCCACATAA
CATGTTGGACATATAGTATCAGAAAAAAGTTACTACATCATAACTTAGCCTATCTTGATGAATAGAGTTG
GGTTTTCAATTACTGGAAACCAAAGGCATCCTAGGTGATATAGTATAATTTTGTAATTCTTAGTGTGTAT
TTGGTGATTTACAATGTATGCAGATTATACATTGTAATTGATTAGTAAGACACTTGTCTGAAGGAATCAG
TTATATTTAGCCCTAGCTTTCTGAATTTGGTGTACCCAAACATGACCTTGTCCAACATGGATTGTAACGA
TTACTTAGCCTATCTACCCCTACATATTAAAGATTATAATAAAACACTATATAAAATATACATTTATACA
AATAATATCGAATTGCTGCTTTTGCTTGAAGCCGTTAGCTAGGAATTTCCAATCATAGGCCGTAAGAGTG
AGTAACCGTTTATTATTGGTATAACAGCATGCATTTTATTTATGAAGTAGTATTTTCTGCAGTATTTGGC
ACCCAGAAGAGTATCTTGTGTTTCTGATACTGACTAGTACCATTAGAATTTTTAGTCATTACACTAAAAA
AGTTGGCAAAGCTAGTGAAACTTTTGCTTGATGATAAGTATTTTGATAAGTGGTGACTTTTTGAAACTAT
GCAGCCAGTTTTAGGAGTAACAGAAATATTTTTATATGAAATGGTATAATATGACTGATTTTTTCTTAAA
ATTGAGTAGTTGTAAGCAAGAAAAGTGCAATACAAATATCTTTTTCTTTTTTCGAGATGCATCTCACTCG
GTCCCCCAGGCTGGAGTGCAGTAGTGCAATCATAACTCGTTGCAGTCTTGCCCTCCTGGACTCAAGTGAT
CCTCCCACCTGAGCCTCCTGAGTAGCTGGGACTACAGGCATGAGGCAGACACTGTGCCTGCCCTTAAAAA
TATCTTGAATTTTGGTAGTGACATTCCTTTGAAGGTATTAAAAGCTAGAAATTTGTTTCATTCTATCAAA
GTTTCAGGTATCTTCATTTAGTTCTACACGTGTGTGCTGTACCCATCTAATGTTTGCCTAAAATTGTACT
GTCTTTTTGGTTTTAAAATAATTTAAGTCTAGGCCGGGCGTGGTGGCTCATGCCTGTAATCGCAGCACTT
TGGGAGGCCGAGGCGGGTGGATCACTTGAGTCCTGGTGGTCAAGGATGCAGGTCGGCTGGGCAAGGTAGC
TCCTGCCTGTAATCCCAGCACTTTGGGAGGCCAAGGCGGGTGGATCACTTGAGGTCAGGAGTTCGACTCC
AGCCTGGCCAACAGGGTGAAACCTGTCTCTAATAAAAATACAAAAAAAACTAGCCGGGTGTGGTGACATG
TGCCTGTAATCCCAGCTACTTGGGAGGTGGAAGTACAAGAATCGCTTGAACTCGGGAGGTTGCAGTGAGC
TGAGATTGGGCCATTGCACAAACAAACAAACAAAAAGCGGTGATCTGTGATTGCACCACTGCACTCCAGC
CTGGGTGACAGAGCAAGACCCTATCTCAAAAAAAAAAGAAAAAAAAATTAAGCCTAAGATGTTTAATTTA
AAAATAAGTTTTTAAAAAAGTATGTTTTTGAGGCAAAATGGTGAGAATAGGACAAGTATTTGAAAATATT
GTGGTACTTGATCAGAACCACCTTTGGTTACATTGTTTTGTGGCCAAAGTGGCTATGACTAAATGACTAC
ATGTTATTTTAAAAACATTGTTTCTAAGGTATTACTGATGTACATGAATGGATTGATATTATCATGGAGT
GGTTTGTTATAAAAGCGAGTTTGGCCCTCTTGTGCTCTGTCGCTGTGTGATGCCTTCCATTGCGATGTGA
CCCCTCAATCTTAGACTTCCCAGCCTCCAGAACTGGGAGCTGATAAATTTCTGTTATTTGTAAACTACTG
AGTCTCACATATTCTGGTATAGCAGCACAAAACAGACTAAGACAGGCAGTTGGGCAACAGCAAGTCTGAG
TTCCCTTCCAGCAGCAACTGGCAGGAGTGAAATCCTGGCTGTCTTCTTTGCAGTCAAATGCTCTACCACT
GAGCTATACCTACTGGCTATCTTCTTTGGACAGTTGCTGTTTTTCACCACAAGCCTGTCTAATTGCTTTA
CTCATTTAACTTATCTGTTGTGGACTTTGAATTTATGACCTTTGTCTAAAGTAATTTAAGTTTTGAATAA
TTCTGAAATGCATTCAGTTGTTAAACTAACACTTAGAAAAAAATGGACAGATCAGAACAAATTTGTCATA
CTTATTGGAGAAATTACTGCATTAATCAGGGTTCTCTGGTGACTTCTAAGTTTCATATCTGTAGAAAAGG
TTATTATTATTCTTGAGCAGTAAGATACTGTATACCCTTTATAAATCAGAGCTTTTTGTTCTGTTGATTT
TATACAAATACGTTGGTTTTATAAGCATGGTTTTTTTTTGTTAACTACTTCTTTTGATTTCTTAATTTAT
TTCTAACATTACTTTGGGCAATAGCCCTATTAAAAGTGCTTTGTACTTTCCAAATTATTTCCATATAGAT
TATATGGGATTCTCACAATAACCATATGTGCTAAGGTAAGATAGGCATTTTAAAAAAAGAAAAACAGGGC
TGAGCACCTGTAATCCCAGCACTTTGGGAGGCAGAGGTGGGCAGATCACTTGAGCCCGTAAGTTCAGGAC
GAGCCTGGGCAACATGGCGAAACCTTGTCTCTACAAAAAATACAAAAATTATCCAGGCGTGGTGACATGC
AACTGTAGACCCATACAGTGTGACATGCAACTGTAGGCTGAAGTGGGAGGATCGCTTGAGCCTGGGAGGT
TGAGGGTGCAGTGAGCTATGATCATACCACTGCACTCCAGCCTGGGTGACAGAGCGAAACCCTGTGTCTA
AAAACTAAATAAATAAATAAAAATTAGAAAAGAAAAATAGAATGGAGACTTTTCAAAAAAATTACTTTGG
CTCATAATTAAGGAATTCCCAAGAGATTGCCCAAAGGAGGATAGCTACTGATGAACTTCTTGGGTTGATT
GTGTGTGTACAGCTTTTAAATGTGTCTTAATTGTTATGAGATGATAACCTTTTCAATAATCAAAAGAGCC
GGGTATTTCTGGTTACCCAAACCCAACTGATTTTAGCAGAAAACATTTGCCTTAAATAATAACTTCTCTT
TGAAATGTTTAGAGAGAAGGAAACTGAGTTTAATGGCAGGGTTGTTGGCTGTTACCCAGGGAAACTAACT
CCTGTCTGGTGCTCTTTTTGTTGCACCAGTAGTTCGATGTCCAAGGGGGGCTGAAGCTTCCTATGGAAGC
ATTGTTAAGCAAGTCTTTCGCAGGCTTTCGGTTGCATCTTTCTACTGTGTAAATAGGGGCATTAGGAGAA
ATGTAATCTTTGAATACTGCCCAACCAGTTTCTGCTTGGTAATGTGCCCTGAAACCCTCAATGAATGCCA
GCAAACAAATTAGATCCACAGTGTATTTGATACGCATGTCTTTTCCCCAAACAAAATTCAAATTTCACAA
ACACAAACTGAGTCATTTTCCAAATGTTTGTATATGAATGGAAGTTTTTGTCCTGTTCTTCTGTAACCAA
TACCATAAAACTTCTGAAGGTCCTTGATGCATTTATTGTACAATGTTAATCCAAAACAAAACTTTATTCT
GACTAAACTTGTAGGTATAGAGAGATACCAAACTCATTTTTGTTGATCAGTACAACATGTTTGTACCAAC
CAGATCTAAAAAATGTGTAAAGGAGTGCCATGCTGTAAAGACCTTATTACAGTTGTAAACATCAGTGCAG
CTGTTACAAATCTAGCAAAACCTCAGGTTAAACAATTTCAAATTTACTGAAGATGACATTCCAGACCCAG
TTTTCATAACATAAACACTCTAGGAAATGCCTTTGAGATGAGTGGGATTGTCATTAATATTAATGCCACC
AAATTCAAGGCTGAGAAGTCATTTCTTTTCAAGCTTTATTTTCACTCCTAATTTTGGAATAAAATATACT
TTTAACCTGAAGTATGGCGTGTCTTTTCACAGCCTGAAAACATTTGATCCTGTTGCCTTTGAATTGTAGG
AATGCAAAAATACAGTATAAGTCTTTTATTCTTGATGGTCATTTAACTTAAATGAGTTTGTTAGAATTAA
AGTTGGGAAGAATTAACTGTTAATGGAACTCAGTTGCATTGTTCAATTAAAAAATAAAAGGATGCTAAAA
ATAGTTGCTGTTTAAGGATTGTATTAGTGTGACATTTTAGAATGCTGCATTTAGGGAAGGAATTTTATTC
TAAAGTGATTTGAAGCACATTTTTTTGTGGTCCTGTCTTTCATCTAGACAAGGTAGGACAAGCATTCAAA
ACCTGTACCAGTCTTAATCTGTTTTTTTCTTCTTAGTTTCCACTTAGTGGGACATCTGGTGAGGTATCAT
TTTGGCCATATAGTCATTTCTAAAGTTTCTTTCTGTGCTCTGATTTCCAATTAAGTCTTCTATGATGTTT
GCCAAATTTAAGAGCATGCAGGGGTCCACTGGAAGTGCTGAATAACTGGGCTTTGGCCTAATTCTTTGTG
CATGGCTGTATGTGTGGGGTGATTTTGTTTTCTTTGCTTGTTTATTGGTAATTGCATTAAATTCCATTTG
CCTTTACTGAATTTTTTTTTGTTGGACTTTTGGGGAAACCTCTAAATTGGATAATAGAGCAATTAAGTGA
CTGTTTGTAAGCGATCCTCAGTGCTCTATTAGAGAGGCAGCATTTATCAAAAGAAAACAGTTGAATTTCT
CTTGTTTAAACTTGCTTTTGAAATTCTGTTAATTTTCTAATAAGGAGAATTGAAGCCAAGCATTGTCAAG
TACCATATTGTAATCTGAAGTTGGTAACTGTGGAAGCACATAGTTGATATGGTGATACCTTTTTCAGAGG
AACTTTGGCTATTTCCATCAGCATAAAGGACACAACAGACTGCATCTATTGCCTTCACCTCTGCCTTATT
TCTTCTGTTTTCCCTTTTTTTTTTTTTTTTTTTTTTTTTTGAGATAGAGTCTTGCTCTGTTGCCCAGGCT
GCAGTACAGTGGCACGATCTTGGCTCACTGCAACCTCCGCCTCCCAGGTTCAAGGGATTCTTGTGTCTCA
GCCTCCAAAGTAGCTGGGATTACAGGCGCTCGCCACCACGCCCACCTATTTTTTTTTTTTCGTTTTTAGT
AGAGACAGGGTTTCCCCATGTTGCCCAAGCTGGTCTTGAACTCCTGGGCTCAAATGATCTCCTCCCTCAG
CCTCCCAAAGTGCTGGGATCACAGGTGTGAGCCAACACTCCTGGCCCCCTTTTTTTTAAAAAAAATTAAA
GAGGTTGTGGAGGTTTCTTTGAATTCTTTTGGTGTTTTTAAAAATGTTATATTTTGAGAAGAAAATCTGG
GCAGGTACAAAGAACCCCTCCCTTTCCTGTTTGAAAACTTTTTTGCAGTCGCCCTGGAATTTTCCTTCAC
TGTCATTCATCCTTCTCTCCTTTCTTGATATTGGGTCTTCTGTTTACTTTATTTTCTTTCTTTGTTTTCT
CCCTCCTCTTGATGTGAAGCAGATGTTCTAGTATCTTCCTAAAGCAGAATGTGTGGGAGATGAATTATTT
CTAGTCACTGCCTGTTGAATGTGAAGTTATTCTAGTCACATTTGATTGATAGTTTGTCTAGATAAGAATT
CCAGGTTGGAAATTATTTTCCTTTAGAATTGTGAGGCATTGTTTAATTTCCTTCTACCTTCCTGTGTTTT
TACAATTTCATGATGATGTGCCTGGTGTGGATCTCTTCTCATCCATTTTCTTGGGCACTTGGTCAGCCCT
TTCAATCTGGAAACTCCTGTCTTTTCGTTCTGAGAATATTTTTGGTGATTATCTCTTCCCTTCCATATTG
GAACTCATTACAAGAAAGCTAATTAAGGAAGAGTAGAGGGTTGTGTTATGGGCTGAATTGTGTCCACCCC
TCCCCCATTCATAAGTTGAAGCTGAAGCTGTAACCCCCAATGGGACTGTATTTGGAGATGGAGCCTTTAG
GAAGTCATACCGGTGGGGTCCTAATCTGGTAGGATTGGTGGCCTTAGAAGAAGAGGTAGAGAGAGAGATC
TCTCCCCACATGAGCACAAAGAAGAGGTCATGTGAGGACACAGGTGGCTGCCTACATACAAGCCAGGAAG
AGGGCTCTCAACAGGACCTAATAGGCCTTGATTGTGGACTTTACAGCCTCCAGAATTGTGAGAAAATACA
TTTCTGTTATTTAAGCCACCATGTATGTGATATTTTGTTATGGCAGCCTAAACTGACGAAGACAGGTTGA
GGTCAAGCTAGGACCTCAGCTTCATAAAGGTGAACTGCATGCGTTGCAAGAGAATATTAACATGATGCTG
GTGCGCGTGTGTTCTCCTTTTTGACTGGTCCCTTTTTGAACTTAGCTCACTCATCTGCATATCACCCTTT
GTGAGTTAGCACAAGTCATTAACCCAAGGTTCTAGATCTGTGCTGACCAATGCCATAGTCAATAGGTACG
TTTAATTATATAAATTTACATTAATTAAAATTAAATAAAATTCAAAATTCACTTCCTCAGATTCATTAGC
CATATTGCATGCGTTCAGAAGCCACATGCAGCTGGCGCCTGCAGTATTGGATGGACAGATAGAGCCAGAA
CCTTTCCATCCTTGCAGAAAGTCTGGCTGTACAACCGTATTCTAGATACTTGCCTTACACCTCTCCCTCT
CTCTTTTTTTTCTTGTCCAGTGGGTCTGAACTTTTTTAGGTTCAAGACATACTTAGGAATACTAGAATTT
GTAGTGGACATCTTCAAGGTTTTAAAACAACACTAAGAAGTAAACAGCCATTATAGTGCAAACTCTGCCA
AAGTGTCATATGCATACTGAGTCTATAACTGCGTCTGCAGTGATCATGCTATTCATTTGGCCATGCTTCT
GCAGTATGGCCCTTAGAAGAGCTGTTTTTTACCCCTACTGGGCTTTCTGATATGTTTGTAGGACAGAGAA
TTGCAGGAAGCAGGCCTTCATATCTGAGCCGTGCTGCTCTGGTTTGCTGTGCTGAATGTTGCTGTGCTCT
CCCGGAAGAGGTAGGCACAAGTGCTTTAGAAGGAACTGTCAGAACCCCACTGCTCTACTGAGCACTGGTG
AGTCTGAGGATTCACAGGCTAAAGGCAGGTCACTGAAAGCGGCCTACATTCTGGAATTTCTCGGAACAGA
TTATTTCCTGAGATGACAAAAAGTATAATTTTGGTCAGAAGGATCACTGAATTTCCTGGAATCTACCCCA
CCAGGCTGTGTCTTCATAGGTGGGAACTGTTCTCAAGAATCCTCAAAACAGCCCTTTGAGGTAGGTTCTG
TTTCACTCCCAAAGAGAAGCGAGGTTGGCACTCAGAAATTTCACATCATTTGCCCTGGCTCACTGAATGA
ACTAGTGAATAGTGACGCCGGGTTCAGACCTTTCCGTTTTTCTTTAAAACTTGTGTTTCTTTCTACCAGA
ATGCAACTAGGGTTGGCCAGTGACCCCTTCTGTCCACCACGTGGGAGCAGCTCTCCTAAAGCTGGGCTCT
GCATTAAAGGGATTGTTTACAAATTCATTAAATTAAACATGTTTAATTCAGGGTAAAAACTGAATGATTT
AGAAGATCTTTTTTCTTTTGTTTTTTTCTTTGTTTTTTTTTTTTTTTTGAGATGGAGTCTCACTCTGTCT
CCCAGGCTGGAGTGCAGTGGCGCCATCTCTGCTCACTGCAAACTCCGCCTCCCGGGTTCCTGCCATTCTC
CTGCCTCAGCCTCCCGAGTAGCTGGGAGTACAGGCGCCCGCCACCGCGCCTGGCTAATTTTTTTTTTTTT
TTTTTTAGTGGAGATGGGGTTTCACCGTGTTAGCCAGGATGGTCTGGATCTCCTGACCTCGTGATTCACC
TGCCTCGGCCTCCCAAAATGCTGGGATTACAGGCGTGAGCCACCGCGCCAGGCCTTTTTTCTTTTATTTT
AAAGAACTGTTGTTATTTTTATTTCAATTAAATTGAAAAACACAGGGAAAAAATGCAACAACAACAAATC
CCAGGCAGGGCATGGCAACTCACGCCTGTAATCCCAGCACTTTGGATCACTTGAGTCCAGGAGTTTGAGA
CCAGCCTGGGCAACATAGTGAGACCTCAGCTCTAGAAAAAAAGAATTAGCTGGGCATGGTGGTGCATGCC
TGTGGTCCCAGCTACTAGGGAGGCTGAGGTGGGAGGATCGCTTGGAGGAGGTTGAGGCTGCAGTGAGCCT
AAATCAGTCATGCCACTGCACTCCAGCCTGGGCGACAGAACAAGACCTTGTCTAAAAAAAACCCAGAACC
AAAAAAAACAAAAAACCCCAACAAATCCCTCATAGCACCAGCACTTATTTTTGAAGACTTCCTGTACTTA
CACATATAAATATTTTGTACAAAAATGTTATGATATTATAAATATTTTTCTGCAGCTTCCTTATTTGACT
TAAGAATTTATGATGAACATCTTTCTGAGTCAGTCAGGAATATTCTTCATGCACTGTTAACTCCTCTGTT
ACTTTAACAATTTTGTGTGTGTGTGTGTGTGTGTGTGTGTGTGTTTTGATGGTTATTGTTATACTGACTT
TAGCCACTTTTCATCATTTTAGCCTTTAGGTCTCTTTTTTTCTTTGTGTGGTCTTAACCGAGAAATAATT
GCAAGCGAGGAACAAAGTCTTAAATTTGGTGGCACTCACCACCAAATAATTGCAGATGTTTGCCTTCCTT
CTACATAGAAAGAGCCCACTCTCATGCTGTATTTGTTCTTCTCATCCTCCCCTGTCTTATTTCTCTTTCA
TTTCGTTTAATTTTAACCTCAATACCAGACTTATTTTGTGCAGCCCTTGGCCTGCTGCGGAGTTATCTTT
GCCACTGGCTCTCTTTCCAGCCCCCAGTCGCTGATGTGTCTCTTGGCAGCTAGTGTAAATGATGGTGGTC
CTCTCATTCTGACGTGGGAGCACCCCAAGTCAGCAGTAATATTTGGTGTAACAAGTACCAGGGTGGGATA
ACCACATATCCCTGGACTGGGATTTTAAAATTGTCAGTTGTCCTGTCATTTGTGGTTTAGGGATCAACTT
GAGCAAGAGAAACTCCGTCTCTACTAAAAATACAAAAAAAAATTAGCCAGGCGTGGTGGCAGTTGCCTGT
AATCCCAGCTACTCAGGAGGCTGAGGCAAGAGAATTGCTTGAACCCAGGAGTCGGAGGCTGCATTGAGCC
GAGATCGTGCCACTGCACTCCAGCCTGGGCGACAGAGCGAGACTGTCTGAAAAAAAAAAAAAAGAAATTG
TATTTATTTCCTACAGACTTCTTTTTCTTGGTTATCACCTGACATTGCCTTATCAGGTATTTTATTATGT
ATTTTATTCCTTTTTATTATTTTTGGCTTAAATTTTCCTTTTAGTCTTTTACTTGGATCATTCTTTCTTA
TTTTCTCCTCCATATTTTGGATTCTTCAGACTTCTTCCCTTTTCTTAATCTTACCATTACCAGATTTCCC
TTCTGCTTAAATTTCATGATCCAGTTTTTCAGTGGATGGAGATAGAAGGCTGAGGTGAGGAAGGTGGGGG
TAAATACGATACTTGCTGAATTTCAAATATAAAACAAGATATTAAGGAACTTATTTCCTTTTTTATTCCC
TATATTTGGGAGACCATAGAATTGGCTGGCCGCTAATATCAAGTGGCTTTTGTGTGTAGACCCTTACAAA
GAAATGACTGATAAAGTCCCTACTTCTGGGAGTTCTGATAGTAAAAAGTGTGACATCCATGACACATACA
TTGCCAGTCAATGATGGATAGAAATGGACAGACTTTGAGGAGATGAGTTTTGAGTATACAGAGATACCAT
TTTGTGTGTGTGTGTGTGCGCATGCATTTGAGACAGGGTCTCACTCTGTCTCCCTGCCTGGAGTGCAGTG
ATGCGGACATGGCTCACTATGGCCTCGACCTCCCAGGCTTAAACAATTCTCCCACCTCAGCCTCCCGTGT
AGCTGGAACCACAGGCATGCGCCACCATGTCTGGCTAATTTTTTGATGTTTTGTAGAGCTGAGGTCTCAC
TATATTGCCCAGGCTGGTCTCGAACTCCTGGACTCAAGCGATCCTCCTTCCTCAGCCTCCCAAAGTGCTG
GAATTACAGGTGTGAGCCACTGCAGGGCCGCAGAGATACAGTATATTTGTGATACCATTAGTAACTTTTA
TTTGACAGAGGGTTAAGTATTGACTAAGGGATAAAACCTATTCTGGGGCTTAGAAAACAAGGTTTTGCTC
CAAGAAGGCGGTTAGATGTGGATAACGGTTTCAGTACTGAATTTGGAACCTTTTTACTAAAATGTAGTCT
ACATGTGGGTATCTAGCAATAGAGTCACTGTTAGTAAAGAACTATATATGTGACATACAGAGGAACCACA
TACAGTTTCTTAAAATAATATGTTCTTCATCTTTGAGGAAATCCTAGACAAAGCTGGAAAAATTTCAAGT
TTTCTTATTGCTCATTACAAATTATAGGGATTTTGATATTGTGCAGTTAAAAGTTCAGTAGATTTTCAAA
ACTAGTTATTAATTGACCTCGGTTCTGCACATTTTTGTTGCTTTGCAAGAGTACCCTTAAGGCTCAAATA
AAGTTAAAAGTAAGGTAAATGGTGTGTTAGACTAAAACTGTATTTTTTGTCTGTCAACACTTAAATAGAA
AAACAAACTAGCTTAAGAACATGACTGCAATTTAGGATCTTAAAACCATATATACCGTAGTATTTTTAAA
GCCTGCAACCAAAAAGTAGAATCATTGTGTTTTATAGCACTTTGAAATTCTGTCTGATGTTACTGTATGT
CTGTGCTGTCCTGATATGGCTTTTGGATTGCGTTTGTGGTACAAGATTGATTTCTTGTATTTGTATATTA
CTTGGCTGCACAGATGGTATCCGCTTCAAATCTACTAAATAAAACTAGAACAATGATTTTGCCAGTTGGT
TTTGACTGCTTTTATTTATTTTGGATGGCTGTAGTCTTTGTGAAGATGGCAGACTAAACCTGGAAGTGAC
AGCTAAGAACAGAATGGGTGGGCTACAGGTCTGCTAATTGATCTCAGCAGAACTCATGCTACTTCTCCCT
GGGTACAAGACGTTTTCTTCAATTGAATGTTCACAGGCCAGCTGAGCCATCCTTTGCTCCCATATCTCTA
TTGTCCTTGGCCCAGACCTTTTCTCATCCTCCCTGGGTTATCTCATCCATTTCCATAGCTTTAGTTACTG
TCTCTCTGTTGATGTTTCTACATCTATGTCTTCAGCTCAGGCCTGTTTCCTAACCTCTTCCTCACATACC
CACTGCCTATTGGACCTCTTCATTTAGATGCCCCAGGTCTCTTGTACTCACCATGCCCTAAGCTGAGCCT
ATCTTTTTATCCAAGTATGTTCCTACTCCTTTGTTGCCCCTTTCAGTGTATGGTGGCATAACACATCTAG
TTCTCTAATCAGAAACCTAAGCAACATCTTTACCTCCTCTCTATTCCTTTTTTTTACTATGTCTGATCTA
AATACTAAATACTATGTGTTCTCCCTGATAAGCATCTCTTATCTGGGTGCTTTTCTCTATTCCTTCATGT
GACTAGACTAGGCCTCAGTTACTGTAAGATGGTCTTCCATCTTACAGTATGATCTTGTCTCCCCTGGTGG
TCCATTTTCTATATTGCTTGTGTGATTTTTCTGAAACAGAAATCTGAGTATATCACTTTAATGCTAAAAA
TCCTCCAGTGACTTACCTTTGCTCTTAGAATAAAGTCCAGAGTCCTTACTCTGTTTTGTAAAGTCCTTTT
AAATCCATCTACTACTTGCTTGAGCAGGGTGACAGTCTTGGTAAAATGTACTTTTATAGCCAGAAGTCCC
CCTCACACTTAACATATCATGATGCTTTCCTTTCTTGTGAGAAGCGAGAAATTTTATTGTGACATTTTGT
CCATTAGTAAACCACACTCAGATCTGTGTGCCCCTCTTCCAAAAAATACATTATACATATTTCTACAAAG
AGAGAAAACATGTAATAGTTGTCAGGTTCTTTTGAGAAATCCTTTTGTAGAAGTTATGCTTGGTGTTGTT
TTAATGTTTTTATTACAAAGTAGAGAGCCTGTCTGATGAATCTTACACAAATAAAGTAATGGAGGTAATT
AGATAACACCACAGCCTTTCCTTTCTCTCCAGAAGAGGTAACAAGAGTCAGCATTCATTTGGAAGCAGTT
GCCCAGACATGCCAACAGAAGTTGTGGGCATCTGTATCTCCTTCTAAGAAAGCGGGTTTCCTGAAAACCT
TGGGAAAGGAAGGAAGAGAGGGACGGAGAGAGGGAGGGAAGATGCTATGTAGGTGGGCCAGTCACCAGCA
GAGGGATAAAAAATGGTGAGATCAAAATATAAAAGCACGAGTAGTGTATTCCTTTGGCTGGCCTCTATCT
CTAGATGCCCTAAAATGTTTATCTCCATTATTATAAGTCAGTGTAGATGCCTAGAGAAAGGAGGCATCCC
TGATTTGGGCAGGATTCTAAACAATTGCCTTTTGTATTGTTAGTCTACACTTTGCTGAAAGTCCCTCTTG
CCTCAGTCTGCTGTTCCCCTGGTGAGCCCCCACATATGGTTCAGTTCTCAGTGTCAGGTCTCTTTTTCTG
GAAACTTTCCTCAACACCCCAAATCTGGGTTAAGTGCTCCACTTAGTCTGCTGTACTATGTAACACTTCT
CACTCTGCAGTTTTAGTTTGTATTTTAAGTTCAGTGACTATGACTAATGTTATTGTTTGAAATGAAAGAG
ATTTTAAGAGTTTCTTCAAGAGGATTGACCAGAGTCCTGAGACATTTCTCCATTCCTAAATATATAAAAG
CCATGAGTTGCCTTTGAACTTCATTACAATTTTGAAAATTTTTAGACATATCAAAGGTATTCTGTAGATG
AGAGCTAGCCCGCTTCAATCCAGTTGTGACTATCTTGAGTGTGAATGTCAGTGTTCATGTTTGATGTTCT
TTATTTTGGTGTATACTCTAGGTGTAAAGCCAGCCCAATATTGTCCCAACACATGACTGTGTTTGTTTGG
CTAACTGAATACACCTTACCTGCCTTTTCTCCACTTTCTGTCTTCATATCGAAATCCATACACTTGAAAT
ATTCTAATCCATTAGATATATGTAATTTCCTCATTTATGCTTTACTGAAACCCTGTTGGAAAATTCAAAT
TAATTACCCTTAGATTAAAAAAAAAAGCCTAACAAAGCTCTGTGGATTTGGTATGGGAACATATCAATAA
ATTTTTTAAAATAAAAACCACATAATTATTTTTAAAGACAACATTTATTTTCAGATCTGTTGAGTTTTTC
CACCTATTTCTTCAAAGTTTTCCTTGTCATCCAAAGACATGACATTTGAGGATCTGTCTCTTTACTACTT
TTCTATTTTTCAGGCAATGAAACCTCTTGTTACATTTAATTAGTGTGTCTAGGTCATGATCCTTAGTCAT
TTTAAATTGGAGTGTGATAGAGAGGTTTTAATATATTGTGCAGTAGATCCTTGATATTTTCAGATGTAAA
AGGTTTGTTTTGATTTTTAAAATCACTTTATTGAGATATGATTGATATATAAAAAGTTGTACATATTTAA
TCTATAGAACTCAATGAGTTTGTGGATAAGTATATACCCATGAAGTTATCACCACCATCAAAACTGTAAA
CATACCCATCACCTCCCAAAGTTCCCCCTGCCTGTTTTGTTATTATTTTTTTGTGTATGGTAAGAACACT
TAATATAAGCTCTACTCTTTTAGTACATTTTTACTATACAGCATAATATTGTTAGCCATGGGCACTATGC
AATATAGTAGATCTCCAAAATTTACTTCTCTTTTAGGACTGAAACTTTGTACCTTTAACTATCACCTCTC
AATTTCCCCTCCTGCCAGCCCCTGGCAACAGCCATTGTACTCTTTTTTTTTTTTTTTTTAATTGATACAG
GGTCTCACTGTGTTGCCCAGGCTGGAATGAGTGGCGTGATCATAGCTCACTGTAGCCTCAACCTCCGGGG
CTCAAGAGATCCTCCTGCTGTAGCCTCCTAAGTAGCCAGGACTACAGGCATGCGCCATCCTGCCTGGCTA
ATTTTTTATTTTGTACAGATGGGGTTTTGCTCTGTTGCCTAGGCTGGTCTCAAACTCTGGCCTCAGATGA
TCCTCTCTTATTGTGGTTTTGATGTGTATTTCCCTGATGATTACTGATGTTGAGCATTGTTTCAAATAAC
TGCTAGCCATTTGTTTGTCTTCTTTGAAGAAAAGTTGGTTCAGGTCCCTTTGACCATTTAAAAGATCAGG
TTTTTTTGTTTTGCTTTGTTTTGTTTTGCTTTGTTTTGTTTTGTTTTGTTTTTTGTTTTGTTTTGGTATT
GAGCTGTTTGAGTTCCTTATATAATATATTCTGGATATTAACACCTTCTCAGATGCATAGTTTGCAAATA
TTTTCTCCCATTCTGTAGGTTGTCTCTTCACGCTGTTATTTTCTTTGCTGTGAAGACATTTTTAGTTTGA
TGGATTTTTAGTTTGATGTAATTCCATTTGTCTGTTTTTGCTTTTATTGCTTTTGTGGTCTTATCCAAAA
AATCTTTGCCCAGAAGACCAGTATTATGAAGCATTTTCTCTATGTTTTCTTCTAGTAGTTTCATAATTTC
AGGTATTACATTTAGCCCATTTTGTGTTGATTTTTCTTTTTTTTTAGATCAACATCTCAAACTTTATAAT
ACACTCACATTTATACACAAATTTCTGTTTACAAGTACAAAAGGCAAAGAACTGCAAAGAAGCTAAGCAA
CTGCATCATCAGCCACATTCAATCGAATTAATACTGTTGTCCCCCGTCCGTAGTTTTAATCCAGAGGAAA
TGGTAGATGCCGTCTCACACATGGACTCCACTGTTAGTTTTAGAAGTTGGAGACTGTGTGTGGTTCCGCA
GAAGTCTGGGTTTCTACAGAGCTGAACTGAGACTCCATCATGTTCCAGGCCATATCAGCCAGAAGAAAGT
CGTCCATTGTTGTTTGAGTTTCGTTGTTGGTGAAGAACAAGCTCCCCAGGGTTTCAAACCCAGAACTCAT
GGTCTGTGTTTCTATACTGTTCAACTGAACTTTGCTTTCTAGAGCAGGTATATCTTTAACAGTGGAGATT
CCTTCAGTTTGTGTCTCTGTGTCAGATGAATCAGTACTCATGGAAAAGCTGGAGTGTTTCAGAATACTTC
CCAGAGGCAGATGAGGGCTACTGTCTAAGAAAAAGTTTAAGTCTGTCTGTGTTTGTCTGTCAAACATCTC
AAGGCCTAAGAAGTTAGAATTTCCCCTACACCCATAGGACTGAGCAGAGGTATCTGCGAGTAAGAAGTCC
GTTTGAGTCTCTGTGTCCAGTGACTCCAAGACTGGCTCAGTGTTCATGGTGCTAAGTTCACTCTCTTCAG
TTTGAGTCTGGATATGTGAGGCCGAAAAGAACTCTTCAATATCAAAATTGATTCCAGGGTTCTGGGCTGG
GCCAGATGGGAGCTGGGTGTCAGGTCCAGGATTTGTGTTAGACAAAAGACTATGATGATCCAATGTCTGA
GCAGGCAGATTACTTGACAAGATGTTTTCCAAATCACTTAATAAATCTATGGTTTGGGTCTGATTATCTG
TCATGTTCTGTGAAGGAAGCATACTGTTCTGTGCACTGAAGTTTATAATTGGTGCACATTTCTCAATCTC
TTGATTTAAAGTCTTAGGCTCATTCTGAGGTAACAAACTATGAGTTACTATCTCTGCTACTAAACTGTTG
CTTATAATGTTACTTGTAGCAACATTATATGATGAATGAACACTCAAAAATGTCTCTGCACATTCCAGCT
TGGTCCATCTGTACATGGTCATCCGTTGGACTTTGTATCCCACTGGTTTGAGTTTCTCAGGAGACCCCAC
CCGACTGGAAACAGGTGTCCATAAATGCATCAGTCTGAGCAGCTATAGATGAAGTTACCTTAGAGCTGGG
CAAAAATGTCTGAGTGTGAACACTAATGGGAAGAGACACTTGAGAATCAAACAACAAATCAGTTTGAGAA
CAAGACGACACAGAGGAATCAGCGGTGGCCCACTGTGCAGAAGGTATAAAGTTTTGTGAGGCATAAGACA
GATCTGTCTGCACGTTGATTGAAGAAATGCCGTTCTTCTGACATGTGTTCCCTAGTTCTTGTAAAGTATT
AGATGGACTTTTACCCAAGTTCACTTGAACACCAGTACTTATTGGCTCAACAGCAACAGGATCAGCAATT
TAGAAAAGAAGTAGGCTCTCTTTAAGAGAGCAAGCCTCTGAATCTAGGCCGAGGATCAGGGTTCCTACTG
ACAAGGGCAGGCAGTAAGTGCACAGCCCCTGTGGCAGAGCCCTGATCAACACCTAACACCACAGGCTGGG
CTGAGGAGTCGGCTGTAGGCACAAAGACAGGCATGAGAGAAAACTGCATCACGGGTAGTTTAAGCAAAGC
CACTTTGGGCTTTGGTAAAAGCAACTTTTGAGGCTATCTCGGTGATGTTGTAAGAAAGAGTCTGCTTGTC
AGTGTTAGAGCCACAAGAGTCTTCAAAAGATGGTTCTAGCTTTATTTCTGAAGCTTCTAGTTCTTGGGTG
TCTGGTCTAGGGATTGGTTGGTTGTTAAATGATTCAGTGGTCTTGTTGGATAACTTCTGGTTTTGCACAG
TTTTCCATTTTCCTTTTCTTACTAGGTGGGTCCCTGTGTTCTGCAGGGATCTCGTGGCCAGTTCGGTAGA
TGTGAGACTGCAATGCTTTTCTACTGGCGTAGGGACAGCCGCATGTGCACCGGAAGGTCTTGCCACAGTC
CTCTGCAAGTCTTTTCAGGTCCCATTCTGTACCGTACGAATTGCTGCACTTGCTACATTTGTGCTTCTTC
TCAGCATGGATTTTCATAAAGTGCTGTTTTACGAGAGAAAACTGAGAAAATGGTCTGTCAGGGCCTCTGG
GGCAGCCTTCGATTGGACAACAGTAGAATTTCGGTACAGTTTTCAAATCTTTTCTTATTATTGGATTGAC
TGTGCTATACTGCATGCGGTGGCTCTTGACCAGGTGCATGTTGAGCGCGGGGCTGTTGGGCAGGATCTTG
CGGCAGCCGCGCACGGTGCACAGGATGTTGGGCCATGTGGTCTGGGACAGCTCGCTCACCTACTGCTGGA
TCAGCTCCCCCGCCAGCACGGAGGCCGCGGGCTGCTGCGTCACCCCCGCGGGCCGCGGCCGGCTGCCCCT
CAGTCGGGGTCCCGGGGGCACCCACGGGCCCGAGGCGGCGGCGGAGGCTCCTCTCGTGGCCGCCGGGACG
GCGCGGGCACCCGCCGCCAGAGCCGTGGACCCCGCCGCCGCCACCGCCTCCGAGGCCGCCATGGCTCCCG
CAGGGCGGCCAGGCCCAGCTCGCAGTTGTGTTGATTTTTCTAAGTGGTGAGAGATAGGGTCTACCTCCGT
TTTTCTGCATGTGGATATCCAGTTTTCCTGAACACCATTCATTGAAGAGACTGTCCTTTCCCCAGTGTGT
GTTCTTGGCGCCTTTGTCAAAAATCAGTTGACTGTAAGTGTGTTCTCTTTTCTGTTCCATTTGTCTGTGT
GTTTTTATGTCAGTACTCTACTGTTTTGCTTACTATAGCTTTGTAGTATATTTTGAAGTCAGGTAAGATT
GATGCCTCTAGCTTTGTTTTTTTGACGCAAGATTGCTTTGGCTCTTTGGGGTCTTAATATATATATATAT
ATATATATATATTTTTTTTTTTTTTTTTTTTTGAGACAGAGTCTCACTCTCTCACCTAGGCTGGAGTGGA
GTGGCGCGATCTTGGCTCACTGCATCCTCCACCTCCTGGGTTCAAGAGATCCTCCTGCCTCAGCCTCCCG
AGTAACCGGGACTACAGGTGCCTGCCACTATCCTCAGCTAATTTTTGTATTTTTAGTAGAGATGGGGTTT
CGCCATGTTGGCCAGGGTGGTCTCGCACTCCTGACCTCAGGTGATCCACCTGCCTCGGCCTCCCAAAGTG
CTGGGATTACAGGCATGAGTCACTGTGCCCAGCCTCCATACAAATTTTAACGGACTTTTAAAAGATACGA
ATTCTTCCAATCTGTGAACATGGGGTATCTTCCCATTTTTTGTGTGTCTTCAATTTTTTTCAATATTTTA
TAGTTTTCATTGTAGAGATCTTTCACATCCTTGGTTAAATTTATACCTAAGTATTTTATTTCTTTTTTTT
TGGCAGGTATTGTAAATGGGATTGCTTTCTTGATTTATTTTTCAGATAGTTTGCTATTAATATTTGGTGT
ATAGAAACACTAATGATTTTTGTTTGTTGATTTTATATCCTGCAACTTGACTGAATTCATTTATTAGTTC
TAATAGTTTTTTTTTAGTGGAATTTGTAGGGTTTTCTATGTACTGTGTCATCTGTAAACATAGACAGTTT
AACTTCCTCCTTTCCAGTTTGGATGCCCTTTCTTTCTTTCTCTTACCTAATTGCTCTGGGTAGGATTTCC
AGTGCTGTGTTGGATAGAAGTGGTAAGAGTGGACCTCGTTGTATTGTTCCTGATTTTAGAGAAAATGCTT
TTAACTTTTCCCCAGTCGGTATGGTTAGTTGTGGGTCTGTCACAGATGGCCTTGTGTTGATGTACATTCC
TTCTATACCTAATTTGTTGACAGTTTTTTTTATCATGAAAGATGTCGAATTTTGTCAAATGCTCTTTCTG
CATCTATTGAGATGATCATATGATTTTTATTCTTGGTTCTGTTAATGTGGTATATCATCTTCATAGATTG
GCGTATGTTGAATCATCCTTACAACCCAGGGGTAAATTTCATTTGATCATGATATGTGATCTTTTTTTAT
GTGTTGTTGAATTCTGTTTGCTAGTGTTGTGTTGAGTGAGGACTTCTGCATCTAAGTTTATCAGGGATAT
TGGCTTATGATTTTCTTTTTGTGTCTTTGCCTCCTATTCTTAGCAGTGTTCCCTTGAAAGCAATTTGTCT
TTTTATAATCTCTGTCTGCTTTTAGGACTTCCTCTTTGCCTTTAGTTTCTGCAGTTTTACTGTGTATTTT
ACTTCAGAGGAGTGTGTTTTGTCCCATTTTCCAGAGGTCTTGTTGGACTGAGCTCTGGTTACCTACCCAC
TCTGGTAGTTGGCTTAATAACCCTCCTTTCATTGGCTGTGATTCCCTGTGTCACTTCTCTACTTTCTTAA
TGGTGTTCCCTTTATTGTCCAAATAAACTACTCTACTCAAATCCCTTTTTCAAGATCTCCTTCTTGGGAG
TAATAGGGCTTCTTCGATCTGAGGATTAATGTTCGTGTTGATCACAATGGAATAGTGATATTGCTGACAG
AAAGATATCATTGGTTATACTTGGAAGATCCTCAGTTTCCCTAATGGCAAAAGACTTGGGAATCTGTGGA
TCAAGATGGAGCATATATGATCCCAGACAGAAGTATTGTTTCTCAGGTCCCCCAGAGTTCCCCAAAGGAT
GGATTTGCATGGCAAGAGAAGCTCCCTTATCACTTCTAATGGGGTTTTATATGGTTTTGGTCAATTACCC
TTCCACTGCTTGAACATTACTCTTCTGGAACCCAGTGACATGTGTGCCTACTCAGGAGGTAGAATTAACT
GATTCACAACAATTGCCAAACGTTTTTTAGAGTTTACTGCAAGGTTGGATGACATGAAGACCAATTTTCT
GGAATCAGTCTTTCAGAAGATGTAAGCCTCAGGCATGTCTGATTTCTATTCTAAAACGTGTGGCTGGGCA
CAATGGATCATGTCTGTAATCCCAGCACTTTGGGAGGCTGAGGCAGGAGGATCACTTGAGCCCAGGAGTT
TGAGACCAGCCTGGGCAACATAGCAAGACCCTGTCTCCACAAAAAATAAAAATAATATCAGATTAGTCAG
GCATGGTGGCATGTGCCTATAGTCTCAGCCATTTGGGAGGCTGAGGTAGGAGGATCCTTTGAGCCTTGGA
GGTCAAGGCTGTAGTGAGCCATGATAGCACCACTGTACTCCAGCCTGGGTGACAGAGCAAGACCCTGTCT
CAGTCAGTCAATAAAATATCATACAGTTATGGTTAAAAACTAAAACAAATTTTTAAAAATTTGAATGAAC
AATAGAGAATGTATTAATATGCTTTGAATTTATATTAATTTTGTGGAGAAGAATCATTTAGAATTTTAGC
TCAATCATAAGCCTGTAGATGATGACACATGAAATTATTATCCCCCCGTGAAATACAAGTGTGAAAGATG
ACTACCTTTTTGTGGTATGATTTCTATATACTATACTCACGCGCACTTCAAGGTTCAGTTGTGTGGTTTT
TCAGTTCTTACTCCAGCCACTGGTTGTGCAAATACTCCGTGATTGTGTAAAAATCATACCTGTTAATTTA
TATATACTGTTACTGGCAGGAGACAGACAGATAGTGCTATTTATTAGAATTATATGTGCTTCTGAGCATT
AGTTACCTAATCAGGTATTTTAAAAGTTCAGAAAAAAATTTTTAAGTCTGAACCTTATGTAGTAACTCTG
AAAAACTATAGAAAACAGAGTAATAAAATATAAAAGTAGTAGATTGAAATGATACTCTTCTTATTATCAT
TATTTCTAGAGACAGGGTCTTGCTCTTTTGTCTAGGCTGGAGTGCAGTGGCATGATCCGTAGCTCATTGC
AGCCTCAAACTCATGGGCTCAAGCAGCCCTCCCTCCTCAGCCTCCCAAGCAGCTAGGACTACTGGTGTGT
GTCACCACACCTGGCTAATTTTTGTTTGTCTGTTTTTTTGTGAAGATGGGGTCTCACTGTTAACTGAGCT
GGTCTCAGAACTCCTGGGCTAAAGTGATCCTCCCATCTCAGCCTCCCTAAGTACTAGGGTTACACGCTTG
CACTACCAAGCCTGGTCTGAAATGAGACTCTTAAAGGAAACAGGAAACAGTGAACAAAGAGAAGAGTCAT
TGGAAATTAAAAAAAAAAAAAAGTGAAATGCCCTATGTGTGATCAAATAGAAGCACTGGATTCAGATTAT
CAACAAACTAATCAAGATGGAAGAGCATAGGAAATTTCCCCTGGCAAGAGCTTGGTAACCAAGACGTCAG
GGGCCAGAGTGAAACATGCTGAATGCATGAGCCAAGTGCTGGGACTCAGTTGACCTATAAGAACAAATAA
AAAGAAATCCATGTAAATCCATATAAAACACAAAACCATGGACACTTGTATTAAAGTATGGCTTGTCAAT
AGAATTTGCATCAGTGCATGCTAAGGTTAAGTCACAGTCAAAGCCTATTCAAAGAATAGCCTAGCGGTTT
TCAAGTAGCTGGGCAGGTAAAGAAAATCCCTTGACATATATAACTCTTAAGATCTGCTGTAACAAATAGT
TATTATACTAGCCAAACCAAGTTTAATTTTCTCCTATATATGGTCTTGGTAAAGGCATCATGTTATATAG
AACAAACATGATCGACTTGGATAATGAAATTGTAAATAAAATCCTGCTTTACAAATTATTATTGCTGAAA
CAGCCTGTGTTTTAGAGAAAGCAAGAATGTTTTTAGATAAAAGAAATAATTATTCCACTTATTAATATTA
AAATTAAATTATAGCATTTTATTTTAATGTCAGAAGTACTTGTTCTGTACAGAGATTATGAAGAACTGGG
ATCATGAATCTGTTGCTGATAAATAAAATTTCAGAGGTCTTGGGATAAATTATGAATTCAGTTTGGGAGA
ACAGGGGTTCCTTATCAGCTAGAAAAACTGATTTTACTACCATATGGCAGTGGTAAAAAAAAGTCCATAC
CAAATTCCTTATCTTGGATATGTATCTTGAATTTTTATGCAACAGAACAGAAATACAGTTTTGTTCAGGA
AAAAAAATTGCAGAAATACTACTCTGTGCAGCTCCTGTCTAGAACATGCCTGCCTTTTTGTTGTACACAA
GAAAGAGAATTTTCTAGTTTAATTCCTTGAAGAGCAATTTGAATGGTTTCCACTTGGGAAATTATGTAAT
TTCATATTAAATAGCAGGTGGTAAGGTAGTCAGATGGAAATGTTCAGTTCATCCAGCATCATCAGATTGA
TTTGACAAATGGAATTCTTTTAACTCTATGGAAAGCATTTTTCTCCCTTTATCCTTTGGCAGAGGCAGAC
ATTGTCTGTGGTTTCCCCACAAAAGTTTGAGTGGGTAAACTTTGGATGTGTAAATATAAACAGCAGACAG
AGACATTGCCTCTGACAGCTGGAAGGATCCACTGAGGATCTTAGAAGGAGACTGCTGATATGGATGATGT
TGGATAGAGAGACTTGAGGGAGGAATTAACCAATGTGAACATAAATGAGGAATGCACATGCTTAGAAAAA
ATGATAGTTCCTCCTTAAGTTTAGGTTGAGGTTGTTGAAAATTTTTGCTTTTGATATGGATAAAAACAAC
AAAAAACTGACTTTTATGGATAAAAACAACAAAAAACAATAAAAAACTGACATACCATGTGGATGAGCAC
ATGGTATGTTTCTTGGTGAGTGGCTCCATCTCGTACATGATATGTAACCTTGGGCAAGATATTTGGGCAA
GATATTTACTTCTCTTTTCCTTAGTTTCCACACCTGTATAGTGGGATTGTAGGGACTGAGATAAGTTTAC
GGTGCTTATAATTGTCCTTGGCATAGAATAAGCACCATGTAAGTGATAGCTGCTATAAAATAATAATAAT
TATTATTTTGGTGGATTGAGAAATTCCCTTAAGGAGGAAGCTATTTGCTTCCTCTAATAACCTTAGTATA
GTTGATGTATTTATATATAAATGAGATACAGAATTCAGGAGCAAATTATTTAGTGTTTAAGATGATTTAT
AAAGATATGTTCATATTACCTTTTAAAAATTAAATTGTGAAGAATACTGCAGGTGCCCGCCACCATGCCT
CACTAAACTCTGAGCCTTTGCACGTGCCAGGAAAGTGCTGTGGCTGGACACTGGGTCTGATGATGCTCCC
CTTTTCTTTGCTTGAACAGTAATCAGCCCTCGAGACTCTTCTGGTTTGTGAAATCTTTGTGCCCCCACGT
TATGTGTGTGTGCTGCCATTAGATCAATTTCACATTATTATTGGAATTTTTGTTTGCATATCTGCTACCC
CACTCAGTTGTGTGTTTTCCAGTCTACTATAAAATGTTTCAAAGATTAAAAATTACATCTTTTCATTAGC
CACAGTGCCTGCTGCATAGTAGGTGTTTTTAGGTAAATGATTGAATGATAAATAAATCATACCGGTCATG
ACAGTATTCAAAAGAAAACAGTTCTTCTCTTGTTTTTCCTGTAAGGAGCAAGGAAATCTTTCCTGGAAGC
CCCTACACCAGACATCTCCACGTATTGGCCTAGGATACAGTCACTGACAAGGGAATGGAATTTCCCTAGT
TGGCTTGGAAAAGGCAGTTTGTGTTTAACCACAAAGATCACTGCACTGGTTACAAAAATAATACATGATT
ATTATAGGAAATTTATAAATTAATGAAAAGTACAATAAAATAATCTGGCATTACACAAAGAAAACTGTTG
TTAACATTGTGGTGTTTGCTTTCCAGTTTTTGGTTGTATATGTATATGTTTGTGTGTATAGAAGAAAATT
GCAATCATATTGTATATAGCTTTTTATAGTCTTACATTTAAGTCTAACATAAGCAGTTTTCCGTACCATT
AAGTCATATTTTTCTGAAATTAGACTAATGGCTTAAGTTCCTTCATATGGCTGTATTACAAATTATATAA
TTCATTGCTTATTGTTGGAGATATAGATTGTTAGCAGTTTTTTACTATTGTAAATAAATATGCAGTGAAC
ATCCTTTTATATCAATCATGTACATCTCTGGTTATTTCCTTACACTAAATTCCTAGAAGTGGATTAATGA
GTGAAAGGGTATAAACACATTCAAAGTTTTTTGATATACTTCTCTGATTATCTTTCAGAAAACTTGGACC
AATTACATTACCAGAAACCTGCATATGAGTGGCTGTTTAACTGTATTCTTGCCAGTACTGGGAATTTTTT
TTTTTCAAGACAGGATCTTGCCCTGTTGCCCAGGCTGGAGTGCAGTGGTATAATCATAGCTCACTGCAGC
CTCAGCTTCCTGGGCTCAAGCAATCTGTGAAGTATTTTTTAATCACTGATTTTATAGTCAAAAGTGGTTT
CACTCTGCTTTTTTGACTTGTAGTGTTATTTTTCATTTAGTCAGCATTTAGTAGATGTTTGTTGAAAGAA
GAAATCCGTGTTTCTTGATATGTATATTGTTTATTCACATCTATTATTGGCATTATTATTTTTGCTTTTT
TATTGTGATATACAAAAAGTACATAAGCTGTACTAATGTTAAGTGTAAAACTCCATATAATTTATGGCAT
TCTATTTTCAGTTTGCTGTTTTGGATATTAGTTTGTTTAGTTTATAGTATTATAATAATTTATAATATTA
TCTCAGCCAAGTCTGTTGGGTGAGATTTATTCCATCATAGTTATATTCTCCCTAGGGCTCCTAATTACAT
AGAGACTTCATTTTTGGTTCTGACTGAGAAATAAATTATTTCTTTCTCAATTCCTTTATATTATTTATTA
CATGTCTATGGTTTTTTTGCACAATCCTTCTCTTTGGCAACATACCGTTTTATTTATCTTCATGTTCTTC
TAGATATCAAAATCTTTTTTTTTCAGTATTTAGAAGAACCATTAAATTATTTCCTTTTTATGCTTTCTCC
CTTATTCCTTGGCTCAGATTTATTTTTTCTGTGTGTGTGCGTGTCTCTCTCTGTGCGTGTGCGCATGCGT
ATGTTTGTGTGTGTGTGTGTGTGTGTGTGTGTATGTGTGTGTGTGTGTGAGAGAGAGGAGTCTTAGAGTT
CAAGTAAATGATACTTTCCTGTGTTATTTATTAACAGTTACAACTGCTGTTGTTAATATTTATCTCATTT
AATCTTTTTTTGTCTGGTAAGACTGGTACATATCATTGTGTTTTTCATTTAGAGGGAAGTGAAATATTTT
GGGCCATACTGTTAATAGTGCTGTGTGGATCAGAGCTGAGATTAGAACCCAGTATGCTAGTGATATGTTT
GGATTTCAAGTTATAAACTGTACTGGGTTTAGTCTTGCACATAAAAAGAGGCTGAACTGAAGTTTCCAAG
ATGTTGAGAAATTTACAGTTTATTTAAATTTGAGTCTTGCTCTCAAGTACACTCTTTTCCCAGTTATTTG
CAGCTAGAAAAGCAAAAGTCTTCAAGTATAATTTAATATGACCAATAGGAACCACATGACTTTTACAGTC
ATTTTGTTGCGTACTAGTGTTTATACAACTCATGACTTGACAGCCGACCAAACTGTCTTATCCATCTCAT
ATTAACATATTGTGAATGTAGTAGGAACTGGCTTAGCAAAATCTTGAAACCTCTGACTCTAATATTTGTG
GGATAGTAAAGTAAACAACTTTGGGGCTTTCAGGCTGTGTGATGCACAGCCCGTTCAGGACATTAATGCT
TATTCTCTCTGTTGACTCCATTGCTTTTGTGAACAGTTTTGCCGACAGGTGTTTAGGCTTGCCAAGAGAG
ATTATTTCTAGCTAGTAGAGGACTCTTGGAGAAAGACATTGGTTTCTACTTAGAAATACAATAACTAATG
ATAATAACTGACATTGAATGGGTGTTAAAATGTGCCAGGCACAATTCTAAGTGCTTTCTGTGTAATTAAT
GTATTTTATTATTCACAGCAACCCTACTAGGTTTTTCCCATTTTACAGATACAGAAACGGAGGCATAGAC
TGGCAAAATAACTTCCCAAGGTCACATAGCTAGTATGTTATAGAGTAGGGATTCAAACTTCGGCAGTCTG
CCTCCAAGTCAGCCTTCTTAATCACTCTGTTATGCTGACATTTATTAGATGAAAAGAAAGAGGCACAGGT
GAGTCATAAGTGGCTGTTTGTGTTTTTGGAAAATATTTGACTTTATGCCTACTGGCAGCTTGAAATAATT
AAGCTGCTACCATTCATTAAATTTTTATTTTTTTGTAAAGTGAGTTATTTGCTTGCATGTAATATTATAA
TTGGAACATAGTGAGTAAAGTATACCCTTTTATGTTTGTACAAATTTAGGGTAAGCCTGTATTTTCATTA
AAAAAGTGGTCTTTGAGAAAGAAAGTGTTTGAAACAAAACTTTGAAGAGTGGGTTCAGAATCAGGGTGAC
AGCCACAGAGTAGTAAGTTATTTGGTCAATGCTCTGTAATAAATAGCAGAGACTGCCTTATTGGTCCTGT
GCGCCATCTTGAAGAGCTGAATGTTGCAGAAATGGCAGGCTAAATGTTTTGGAGTAACCCAAGCTGACTC
TAGGCAGAATTTGTCTTTGGCATCTTCTCATTTTGCCTGTCACTGGCACCTGTCTCATTCACCTTTTGTC
ATTGCCAGATATGGTATGGTGCCTAACAACCTTTACTAACTATCAACAAGTCCAGCTGGGTGTGGTGACA
TGCACCTGTAGTCCCAGCCCCTGGGGAGGCTGAGGAGGAGGATCCCTTGAGCCCACGAGTTTGAGGCTGT
AGTGAGCTATGATTGTGCCACTGCACACCAGTCTGGGCAACAGAGGAAGAGCCATCTGTTCAAAACAAAA
CAACAACAAAACAAGTTTCTCATAAAATATTAATTAATGTTTAATAAAAGGGATATCCTTTCTCAGGGTA
TTTGCATTTAATAGATCATTCTCAAAGTTTGGGCTTTGGGTTATTTTTGAGAGTTGGCATTTATTGCTAT
AAACTTCCCTCTTAGAATTGTTTTTGCTCTATCCCATAGGATTTGGTATGTTATGTTTCCGTTTTCATTT
GTCTCAGGATATTTTTAAATTTCTCTTTAAATTTATTCATTAACTCATTGTTTAGGAGCATGTTGTTTAA
TTTCTATGTATTTGTAAAGTTTTCAAGGTTTCCCCTTTTATTGATGTCTAGTTTTATACCATTGTGGTCA
GAAAAGATACTTGACAAGATTTTGATACTCTTAAATTTAAAAGACTTATTTTGTGGCCTAACATATGATT
TATACTGGAAAATGATTGATGTGCAGTTGAGAAGAATGTGTATTCTGTACCTGTTGGATAGAATGTTCTG
TAAATGTTTGTTAGGTCCATTTGGTCTAGGGTACAGTTCATATCTGATGTTTCTTTGTTGACTTTCTGTC
TAAATGATCTGTCCATTGCTGAAAATAGGGTGTTAAACTCTTCTACTAGTATTGTGTTACAATCTATCTG
TTTCTTGAGATCTATTAATATTGGCTTTATGTATTTAGGTGCTCTGACATTGGGTGCATATACATTTACC
CAACATCAGAGCACCTAAATATGTAACATATCCTTTTGCTGAATTGACCAACCCCATTATCATATATTAA
TATAATGACCTTCTTTGTCTCTATTTACAGATGACTTAAAGTCTATTTTATCTGATATAAGTATAGCCAC
TCCTGTTTTGGTTTCCATTTGTGTGAAGTATCTTTTTCCATTTATTTACTTTCAGTCTATGTGTATCCTT
ATAGGTGAGGCAAGTCTTTTGTAGGCAGTATATAGTTGGGTCTTGTTTTCTTTTTTTTTAAATCCATTTA
GCTACTCTGTGTCTTTTAATTGGATAATTTAATCCATTTACATTCAAAGTAATTATTGGTAGGTAAGGAT
TTACTACTGTCATTTTATTAATTTTTTTCTAGTTTTGTAGATTCTTTTTTTCTTTCTTTCTTCCTTTGAG
GTTAAGTGATTTTCTCTAGTAGTATATTTTGATTCTTTGCTTTTTATTTTTAGTGTATCTATTATAGGCT
TTTGCTTTGTGGTTACCATGGGACTTATAAAAGTATGCCTTATAGTTATAAAAGGTTATTTTACACTGAT
AGCAACTTTGATCGAAAAGAAAATACTCTTTAACTCCACTCCCCCATTTTGAGCTTTTGGTGTCAAAATT
TATATCTTTTTATATTGCATGTCCCCTAACAAATTATCGTAGCTATTATTTTTAATTGTGTTGTCTTAAC
CTTCTTAAAAAAATATATGATGTACATACCACCATTACAGTATTAGAGACTTCAGAATTTGACTGTGTAC
TTGCTTTTATCAGTGAGTTATATACTTTCAGATGTTTTTGTGTTGCTCATTGCTATCCTTTTCTTTCATC
TTGAAGAACTCCCTTTAGCATTTCTTGTAAGACAGGTCTGGTGCTGATGAATTCCATCAGCTTTTGTCGT
CCAGAAGTCTTTATTCTTTTCTTCATTTCTGAAGTACAGCTTTGGTAGGTGTAATATTCCTGGTTGATAG
TTTTAATTTTTTTTTCTTTAGGACTTTGAATTTCTTCAGGACAATGTTTCTGCTTAGAGGTCTCTTGTTA
GGCATATTAGTACTCCCTTATAAATTATTTGCTTCTTTTCTCTTGCTGCTTTCAGGATCCTCTCTTTGTG
CTTGATCTTTGACATTTTGATTATAATATGTTGTGGGGTAGTGTTATTTGGATTAAATCTGACTGGTTGC
CCTTGATCTTCCTGTACGTGGATAGCTATAGCTTTCTCCAGGTTTGAAATACTTTCTGTTATTATTTCTT
TAATAAGCTTTCTACTACTTTCTCTTTTTCAAGGTTCCCCCTTGAACACCAGTGACCCACATATTTGCTC
TTTAGATGTTACTCATAAATCCTGTAACTTCATTCCTTTTTCCTTTTTCACCTTTAGTTACGTATTTTCA
ATTAACCTGTCTTTGAATTCACTGATACTCCTCTAATTGAACAATTCTGCTATTGATGCTTTCTGTTGGA
TTTTTTATTTTGTTCATTGTAGTTTTTAGCTCCTGGATTTCTGTTTGATTTTAAAAAATTATTTCAATCT
CTCTGTTAAATTTCTCTGATGAATTTCTGAATTGTTTTTCTCTACTTTATTGAAGTTAGCCAAATTTCCT
TAAAACAAGTATTTTGAATTTCTGTCAGGCAGCTTTTCTATAATCCTCTCTTTAGGATCAGTTACTGGCA
GCTTATCTTTGTCCCAAAGCATGTTTTTCCTCCTTTGGGCCAGCTGGTTATTTAGTAGTGCCTTGTTCAG
TTTCCACATTTGTGAATTTCCTTTGAAACTTCCTGCATTTATTTTTAATTGCTTTTTTTGTCATCAGAGC
ACATTTGTTATATTACTAATGTTCTTTTAAATATATGAAGACTCATTTTATGACCTAGCATATGATCTGT
TTAGAATATTCCATGTGATCTTAAGAAAAATGTATATACTATTGGGTGGAGAATTCTATAGATGTAAGTT
AGATCTAGTTGGTTTATAGTGTTATTCAAGTGTTCTGTTTTCTTGTTGATCTTCTTTCTAGTTGTTTTAT
CTATCACTGAAAATGACAGTTTGAAGTCTCCAGCGATTAATATTCAATTGTCTGTTTCTCCCTTTCTGTC
AATTTTTGCTTCATGAATTTTGGTCCTTAGTTGTGTATGTTTATAATGGTTATATCTTCCTGATGGATTG
ACCCTTTTATGATTAACAAAATGTCCCTCTCCATCTCTAATAGCTTTTTGTTTTAAAATTTGTTTTTTTT
AATATCAGTATAGCCACAATTAAGTTTCTTGTTTTTGTATGTTTGCATGACATATCTTTTCTATCCTTTT
ACTTCCAATCTGTTTGTATTTTTCACTCTAAAGTGTGTCTTCTATAGACAGCATATAGTTAGATCATGTT
TTCTTAAAGTCTGACAATCTTTGTCTTTTGATGGGAATTTTTTTTTTTTTTTTTTTTTTTTTGAGACAGA
GTCTTGATCTGCCACTCAGGCTGGAGTGCAATGGCACGATCTCTGCTCACTGCAGCCTCCGCCTCTCAGG
TTCAAGCGATTCTCCTGCCTCACCCACCCGAGTAGCTGGGATTACAGGCACCTGCCACCACAGCCAGCTA
ATTTTTGTATTTTTAGTAAAGACAGCGTTTCATTATGTTAGCCAGGCTGGTCTTGAACTCTTGACCTCAA
GTGATCCACCCACCTTGGCCTCCCAAAGTGCTGGGATTACAGGTGTGAGCCACCGTGTCCAGCCTGATGG
GATTGTTTATTCCACTCACATCCATGATATTATTGACATAGTTGGCTTTATGTCTGAACTTTTACTTTTT
CTGTATATCTCGTCTTTTTTTTGTAACTCTGTTTCTCCTTTTATTACGCTCTTTTAAGTAAGTATTATCT
GTTTTTTTTTTTTTTAGACAGGGTCTCACTCTCTTGCCCAGGCTGGAGTGCAGTGGCATGGACATGGCTC
ACTGCCACTGTTGACCTCCTGGGCTCAAGTGATTCTCCTTCCTTTGCTGCCCATGAAACTGGGACCACAG
GCATGCACCACCACACCTGGCTAATTTTTCTATTTTTGATTTTTTTTTTCTTTTTTTTTCTTGAGACAGA
GTATTGGTCTGTCACCCAGGCTGGAGTGCAGTGGTGTGAGCTCGGCTCACTGCAACCTCTGTCTCCCGGG
CTCAAACTATTCTCATGGTTCAGCCTCCTGAGTGATTAGGACTGCAAGCATGCACCACCATGCCCAGCTA
ATTTTTGTATTTTTAGTAGAGACGGGGGGTTTCACCATGTTGGCCAGGCTAGTCTCTTAAGTCTTGGCCT
CAAGTGATCTGCCTGCCTTCACCTCCCAGAGTTCTGGGATTACAGGTGTAAGCCAGCATACCCAGCCAAT
TTTTTTTATTTTTTTGTAGAGATTTTTTGTTGCCCAGGCCAGTCTCAAACTCCTGGGCTCAAGTGATCCT
TCTGTCTTGGCCTCTCAAAGTGCTGGGATTACAGGCATGAGTAGTAACTGATGCCTGTAAGTGAATATTT
CATAATGTAGCATTTTAATTTCTTTAATGATGTTTTCACTATTCTTTTTGAATTTTTTTTTTTTAGTGGC
TACTCTAGAGTTTGCCGTAGAATAATTACCGTGATATATAGAAATGTTACTCCTATACATATGATTTTTG
ACTTATGTCCTATACATATGATTCTCGACTTATGATGGAGTTATATCATCATAAGTTGAAAATATTGTAA
GTCAGAAATTCACTTAATACACCTAATGTAGTGCACATCATTGCTTAGTGACACCGTGCACTGTAGAGTG
TTACTTGTTTACCCCTGTGATTGCTGGGCTGACTGGGAGCTGTGGCTTGCTGTCACTGCCCAGCATTGTG
AGAAAAGCATACTTGAGAAGAATGTATGTTCTGTTGTTGGGTGGAGAGTTCTATAGATGTCTGTTAGGTC
TGCTTGGTTATAGTGTTATTCAAGTGTTCTATTTTCTCGATCTTTTTTCTAGTTGTTTTATCAGTAGTTA
TGGTATCACATATCAGTAGCCTGGGAAAAGAGCAAAATTCAAAATTTGGAGTATGGCTTCTACTGACTGT
GTATCACTTTCATATCATTGTAAAGTCAAAAAATTGTAAGTCTAACCTTCATAAGTTATGGATCATCTGC
ATAGCTTTATTCCCTTCTCTTCCTTTTTTTGTGACATTATTGTTATACATATTACCTCTCAATGTTATGA
ATTCAACAATGTTTTAATTATTACTTTAACATGTGTAGTTACTTCCTTAGCCCAATACAGCTTGGCTGTT
TAACTCATTTGCACTGTGTTTGGCAAATATATTTACATATCTTATTCCTTTCTATATGTTATAGGCCCAA
CAGTACAGTGTGTACATATCATTTTATGCAATTCATTTTTATGTCAGTTATGAGAATAAGAGAGAAAAAA
TGTGCATTTATAATTACATAATTATCAGTGTTCTTTTATTGTGTGGATTCAAATTACCTTCTGGTATTAA
TTCACTTTTTTTTGCAAAGTGGGTTTTCTAGCAACAAATTCAGTTTTTGTTCTTCTGGGAAAGTCTTTAT
TTCACCTTCATTTTTGAAAGGTAGTTTTGGGGGATATGGGATTCTTGGTTGACAACTTTTGAGCACTTTG
AATATGTTTTCCCATGTTTTTCTGGGATCTTTTGTTTCTGCTGAGAAGTCACCTGTTAATCTTATTGGGG
TTCCCTTGTAAGTAATGGGCTATTTTTCTATTTCTGCTTTTAAGACTTTCTCCTTGTCCTTGACTTTCAG
CATTTTCACTACAGTGTTTTTGTTTGTGGATCTCATTGCATTTATCTTATTTGGGGTTTGTTGATGTTCC
CAAGTGCCAATAAATTTGGGGAGTTTATATGTTTCTTTTTAAAAATTATTTTATTTTTAATTGGCACGTA
ATGTGCATATTTATAGGGTGCAATGTGATGTTTCAACACATGTATATATTATGTACTGATCAAATTAGGA
TGATTAGCATATCCGTCATCTGAAACATTGTTTCTTTGTGGTGAGAACTTTCAAAATCCTCACTTCTAGT
TATTTTGAAATATGCATACATTATGTTTAACCCTTTTCCCATTTAGGAAAAAAGGTGCAGCTCACTACCC
AGCGCTCATTTAATTTTACATTAATGTGCTCTTTGAGGCTGAAGCAAATCTGACAGATTTTCAATGTGAA
AATAAAATATAAAAACTGTTTTTGGAGTTATTTCTAAACAGAACTAACATCAGAATTGTCTGAATCATCA
GAATCATCTATTTCAGAAAAATTGAATTGAAATGGATCTTTGGCTAATAACTGTTCAAGAACAATGTTAC
CATCATGCGTAGGAATGCTGCATTTTCTAGGATTTGATATTTTCAGCGATTGAGAATTACTATATTTTGT
AAATGGAAATACCAGTGCTAAAAACAGAATGTTATAAATAGAATGATGTTTTTTGTTTCCAAATTCAATG
TACTAGAGCTTGCGAAAATAGTAGTAAAAGCGAGCAAAGTTATCTCAGAGTAGACGCTGCAGCCTCATGT
ACTGTGGGCGAGTATTCTCTGGGCAAACGGGAAAAGGGTTAACTGTAGTCAACCTACTGTACAATAGAAT
ACAAGAACTCTTTCCTCCTGTCTAACTGTAACTTTGTACTGGTTGATGAACCGATAATTATGCTTTTTAA
GCTCGTGGAAAATGTTTCAGATCTTTAACCACAGTTAGTAGGCAAAAGTACTCATACTCTTTCTTTGATT
TTTGTTGTTGTCGTTCTTGAGATCCTACTCAAATCAATGTGGTGAAGCCTTCTGAGTATTGCCAGACCAG
ATATAATTCTTGGGGTATGACAAGGAATGAGTAGTAGCACCTTATGAAGCCTTAGGTTAGGTATACATAG
AAATAATCATGCTGTTACTTGAGATTGCCCTGCCCCTAAATAAGTGGTCTTGAAGATGTGGTAGGCAAGG
GACAGAGAAAGACCAAGCTCCCTGTGACCAGAAAAGGATTATCTGTTATTTAGAGGAAAGGGTTAGAGAA
AAGCTGGCCCATTGAATTAATGCAAGAAACCAGAGGTACTGTTAGGATATTCTGCAGACTAAGTCAGGGT
GAAAACATATTTAAGAACAAATTCAGCAACTGAGAAACTTCATGTCTTGAATGTGAGAGGCAATCTCCCA
TATGAAACTGTTAGTTGACGTTGAAAATTCATTCATCCTGGTGGTTGGGTTAGGAGGAGACCCAAGAAGA
GCTTTTGTATTTAGTTTCCTGGTGGTTGGAGAGTTCAAACACTAGACTTGGAAGCAGATAATACCTCATA
GTACAAGGAACAGGAACTTTTCTCACTGTCTGGAAAAACCAAGCATCTGGCTGTCTGATTTTAGTGAAAT
TGTAATTCAGGGGGAACTGATTAATTTTATTAGACAGGGTGTGAGTCCTGTGGCTCCTGCCAGGTGTAAC
TGAGATCCACTCTTGCCTTCTCTCTCTGCTCCTGCTATTTATGATCCTTATGCTCAGAGTGTGTAGAGTA
GGTTTGCATTCTTTTTTTTCTTTTTAGAGACTGAGGTCTTGTGAAGTTGCCCAGGCTGGATTTGAACTCC
TGGGCTCAGGCCATCCTTCTGCCTTAGCCTCCTGAGCAGCTGGGATTACAGGCATGCACCACCTAGCTAG
GTTTGGGTTCTGTTTGGCTACACTTCCTCCTATTCCTGCCACCAAGGTTTGTAGTTGTCGTTGATTTTAA
TAGACTATTTTTTAGAGCAGTTTTAGGTTCACAGCAAAATTGAGCAGAAAGTACAGAGATTTCCTCTATA
CCCCATGCCCCCACATGCATAACATCCCCCTACTGTCAACATCCCCCACCAGAGTGGTACATTTGTTAAA
ATTGATGAACATGCATTGATACATCATTATCACCTGAAGTCCATAGTTAACATTAGAGTTTACTCTTGGT
GTTGTACATTCTATGGGTTTGGACAGATATACATGTGTCCGCTATTATAGTATCATACAGAATAGTTTTA
TGGCCCTACAAATCCTCCGTGTTCTACCTATTCACTCTTCCCTCTCCCCTGCCCGAGTGGAATTTCTGTT
TTTATTTTATTTTATTTTTTGTTTATTTATTTTTTTGAGATAGGTTCTTGCTCTGTTATCCAGGCAGGAG
TGTGGTGGCACAATCATAGCTCACTGCAACATCTACCTCCTAGGCTCAGGTGATCCTCCTGCCACAGCCT
CCTGAGTATCTGGGAGTACAGGTACACACAACCATGCCTGGCTAATTTATTTTTCTTTTTTTTTTTTTTT
TGTAGAGACAGGGTCTTGGTATGTTGCCTAGGCTGGTGTCAAACTCCTGGGTTCAAGCAATCCTCCTGCC
TCAGCCTTTGCAATCCCAAAGTGCTGGGATTACAAGCATGAGCCACCACGCCTGGCCTGTTTTTATTTTT
AAAAATTACTTGAGGAACTGGTTCTAATTCCAGTCCTGTGCTGAACTTGTATCATACATAGTTCAGAGAA
TTCCTACCTATGTAGGGACTGCAGATATCCTCCCCTTATCCCTTTCCTCCTTTCCCTTCCCCAAATAATG
GCAAGTCAGTGCCCATACTGTGTATCAGTCCATTTCATTTTTTGAGATTTCCTTGATGGTCTGCTAATTT
GGAGACACTTCTGGACAAATGATAAATTTCTGGCAGTACAAGCCCAAAGTAGTAAGGTTTTGTTCTAGAC
ACTGGAGCTAGAATGAAATTTAAAAATGGTTCCTTGCTTTTACACTGTTGGTGGGAGTGTAAATTAGTTC
AACCATTGTGGAAGACAGTGTGGAAATTCCTGAAGGATCTAGAACCAGAAATACCATTTGACCCAGCAAT
CCCATTACTGGGTATATACCCAAAGGATTATAAATCATTCTACTATAAAGACACATGCAAATGTATGTTT
ATTGCAGCACTGTTCACAATAGCAAAGACTTGGAACCAACCCAAATGCCCATCCAATGATAGACTGGATA
AAGAAAATGTGGCACATATACACCATGGAATACTATATAGCCATAAAAAAGGGTGAGTTCATGTCCTTTG
CAGGGACATGGATAAAGCTGGAAACGATCATTCTCAGCAAACTAATACAGGAACAGAAAACCAAACACCA
CATGTTCTCACTCGTAAATGGGAGTTGAACAGTGAGAACACATGGACACAGGGAGGGGAACATCACACAC
CAGGGTCTGTCAGGGGGTGAGGGATTTGGGGAGGGACATCATTAGAAGAAATACCTAACGTAGATGACGG
GTTGATCGGTGCAGCAAACCACCATGGCGTGTGTATACCTGTGTAACAAATCTGCACGTTCTGCACATGT
ATCTCAGAACTTAAAGTATAATAAAAAAATTAAAAAATGGTTCCTACTCTCTATTTACAAATTATGACCA
CTTCATCCAAAGATCACAAATTCTAAAGTGATACAATCTTTCTGGGTAGCCTTAACTAAAAGAGCTGTAT
CACTCTTGAGTTCCTCTATGCATATGCCAATCATTTCCTCTTTGCTACACCCTGTTTTGAAGTGTCTGCC
CAGACAGTAGTACTCATCAACCACCAATCTTTGTGGGATGAGCAACTGACCCCGTAGAAAACTATCTAAA
GGGTCTGTTGGCTGGATTGAGCCAATCACATCCTCTTCCCTGAGAATGGGGACCTTGAGATACTGAGCTG
ATTAGATAATGGTTAGTTCTTGGGCTGAAATTTCGTATAGAATTGTGACCACCTTCTGAACTACAGCATA
AAAGACGTGCAAGCTGGGGGAACAAAAAAAGCCACAGACAGCAGAGACAGCAGAGGCAGCTAGTGTACAG
AGAGATGTGCTTGAACGGAGCAGAAATGTGGACACCCTGAGATGTGGCAGGAGCTTCTAGTTCCACTTCC
TATTTGGACCAGCTAAACCTTTTCTTTCCTTGGGTGTTGTTCATGAGATCTTTGGTCATAGCCTTTTCAT
AACACCTCTTCCCCCATTTGACTTGTGCTAGTTGAGTGGATTTCTGTTCTAGAGCTGAAATGCAGTGCCA
GCAGAATCTAGTGCAATAGAGTCTTATGTAATTAAAGTCCTAAAGACTCTTTGGGTTGTGAGACACACAA
AAAGATAGAAAACCAAGGTTGATAATCAGTACAAAATAACTACATGTTGGGGTACCCTTCAGTCAGTCAA
TGTCTTCCTCACCGGTAGGCATTTAGTGACTCGTTCACCACCCTTCCCTCGTCGAGGCTAAAGAATGCCT
ACGTCATTTCATCTTTTCTCAAAAAAGAAAAACATTCTGCTGTTTTCTGCTTCTTTATTGATCACATTTG
TCCTTAATTCCTTCATATAACCTCAGGTAGAATATTAGTCTAGGTGCCAGGGGATGTGGGTTCTGTTCTT
GTTGGGGTTCTAACGGGATGGATGGTCTCTGTAAGGTTCTTCATCTCTCTGTACCCCTACCCCCACACCT
TTGCCGGACAGTGAAGAGTTATGCTGATCACCGATTTCTAGCTGATAACTCCCACAAAACAAGGTGTGAA
TAAAGAGTGTGAAGAAATCAAGCTACTTCACAGGCATTTGCTATAGATGAAATAAATATGCCTATCCCTC
ACTTAATGATGTTAATTCTAAGAATCCTGCCAGTAAGTGAAAAGCTAGAAAATGAAAAATTACTTCTGTT
AATTTTTTTGTTGTTGTTTTGGTTTTGTTTTTTGAGACAGAGTCTTACTCTGTTACCCAGGTTGGAGGGC
AGTGGCGTGATCTCCCAGCTCACTGCAACCTCCACGTCTCGGGTTCAAGCAATTCTCGCCACAGCCTCCC
GAGTAGCTGGGATTACAGACATATGACACCACGCCCAACTAATTTTTTCTATTTTTAGTAGTGACAGGGT
TTCACTGTGTTGGCCAGGCTGGGCTCGAGTTCCTGGCCTCAAGTGATCCACCCGCTTGGCCTCTCAACTG
CAGCCGGCTAACTTATGTTCATTTTAGTGGTAAAAGTTATGATGTGTTCCATCCCAACCTAAGATGTCCA
AATACTTTCTACAAATAGAAAAATATATCATTGAGCAATGAAAACTTTTTATTAGTAAATAATCCAAAAT
TAAATAAATGTAATTGGTACATAAAATGTGTTAAAATGATGCTTTGTTGCCTCAATAAAAAAGAGGAGGC
GGGGCCGGGCGCGGTGGCTTGTGACTGTAATCCCAGAACTTTGGGAGGCCAAGGCAGGCGAATCACGAGG
TCAGGAGATCGAGACCATCCTGGCTAACATGGTGAAACCCTGTCTCTACTAAAAATACAAAAAAATTTAG
CCAGGCGTGGTGGCGGGTGCCTGTAGTCCCAGCTACTTGGGAAGCTGAAGCAGGAGAATGGCGTGAACCC
GGGAGGTTGAGCTTGCAGTGAGCCAGGATCGCGCCACTGCACTCCAGCCTGGGCGACAGAGCGAGACTCC
ATCTCAAAAAAAAAAAAAAAAAAAAAAAAAAAGAAGAGGCTTGATGGGATTGATGGAAGAGGGAAGGAGC
CATACTTTGGAAGGTGGTTGGTGAGTCAGGTGATAAACTTTTAAGGCGTGCATTCAGCAGCAAAAGTGCT
TAATAATATTTTTCATTGGGGATTTTGACAGTAGAAGAAACTCCTAATGTGGAAACCTTTGGTATATTGG
TAGAAGGGAATCTTCAGATCAAAAAAAAAAGCAAGATGTAACTTTGCTTCCCTTTTTGTAATTTGCAATT
CATACACCTCCTTGCAGGATGCGATATTAGTTTCCCGAAGCTGTTATAGCAAATTACTACAAACTTGTTG
GATCAAGAGAACAGAATCATATCTTGTTGCAGTTCTGGAGGCCAAAAGTGTGAAAACTGACATGGCCACA
TTCCCTCTGGGGACACCTTCCTCTCACTTCTGGCGGCCAGCATGGCATTCCTGGGCTTGTGGCCGCATCC
CTCCAATCTTTGCTTCTGTCTTCACTTTGCTGCCTCCTCTGTGTCTGTCTCCAACTTGCTCTGCCTCTGT
CATAAGGTTGCATGTGGCCTACCCTACCCTGATATTCCAGGACAAGCTCCTTCTCTCAGGATCCTGAATG
TTACCACTTTGTAGTAGTTGTTGTTGTACAAGGTAATAGTCATTCCTTTGCCATGTAAAGTAATATTCAC
AGGTCCCATGTGCTAGTGTGGGAATGAGGTGCCGACATTTGGGCTGCTAATTCTTTGTTGTGGGAGACTG
TCCTGTGCTTGGTAGATGTTCAGCGGTGTACCTGGCCTCTGCCCACTGGGTGCCAGTGACATCCTTCTCC
CAGCTGTGACAACCAAAAATGTCTTCAAACATTGTCAAGGGTCCCCTCTGGGGCACGACTGTCCTTGGTT
GATGAGCACTGCTTTAACCTAATCAGAGCCCATTCTTATCCCACTCAAATATGCTGACTGGGAAGTTTCC
AGTCTCGTTAAGAAGGGGGAGGGTGGAGAATGGATGCTGGAGAGGTGACTGCTCCTCTCCACTACACCTA
ACATTCTAGTGAAGTCCACAAATGGGCCAAATCGAGCAGGATTATGAAATTTTTGCTAGACCCCTGTTAG
TGTATTCTAACATTGTGGCATTTTATATTAGTCAACTAAATCTCAATATTATGTTTTAAAAAAATCCAAT
GGACCTCTGAATCCCCAGGTTGGGTTTTTTCTACTTTACCTATGTTAAATATGTTAAATACCTAGGTTGC
CCTTTATCTTAGAATTTGTCCATGTATCACCTCATTCTTTTTCAGCAGGTCCCTTTCTGGAGGTTTTCAT
ACTCAGTTGGATTTATCCTCCCTGCGACTGCTGCCTGCTCCTTGCCTTGCCATGCGGCATTAGTAGAGTA
TGAACTGCACATTTAGCACAGCAGTTTATGCACTAGAGAATCAGGATTGGAATTTTTCTGAAGTATCTTA
TTTTTCTGTGAAATAATTGAAACAGAGTATAGACACATTTGCTGTTTTGAAGTTTTTATGATTTCCAAAG
TAATAAATGTGCACTCTCACAGTTCTCGGGTGGCTGATCTCTGGAGTGCTTGCCGTTTCTCCGGGTGGTT
GCTTTGTACAGGCTCCCCTCTCGTGTTGGCCTGCAAGTGCTCTCGCTGCGACGGGTCCCTGACCGGTACT
GGATGAGAGGACTAGTACTGGTGCAGATGTTGGCATAAACAAAAGCTGCAGCTTTTTAATCATGACTAAG
GCATGGGAGAGGCTGACATATAATTGTGGGGAAAAGCGAGAGAGATCAGATTGTTACTGTGTCTGTGTAG
AAAGAAGTAGACATAGGAGACTCCATTTTGTTATGTACTAAGAAAAATTCTTCTGCCTTGAGATTCTGTT
AATCTATAACCTTACCCCCAACCCCGTGCTCTCTGAAACATGTGCTGTGTCAACTCAGAGTGGAATGGAT
TAAGGGCGGTGCAGGATGTGCTTTGTTAAACAGATGCTTGAAGGCAGATGATCAATAAATACTAAGGGAA
CTCAGAGGCTGGCGGGATCCTCCATATGCTGAACGCTGGTTCCCCGGGTCCCCTTATTTCTTTCTCTATA
CTTTGTCTCTGTGTCTTTTTCTTTTCCAAATCTCTCGTCCCACCTTACGAGAAACACCCACAGGTGTGTA
GGGGCAACCCACCCCTACAATAATGGTTCCCAGAGTGTCCCTCTCAGACCAATAAAACATAGCAAAACTA
CGTGATAACCAGGCTGGAATGTATGTGAATTGTTCGAGTGAGTCTGTGTCACTTGAACTGTACTGGGCAG
TACCTAGGGGCTTCATGTAAGGCATGAAGGGCTCCAGAAAGAACCCGCTCTTTGCCTTCAGTTGTATTCT
ATATGTTTAATACACAGCACAGCAGAAGCAATCAGCTCTCCCCAATGTTACTTATCCCATAAATCATCTT
TCCTTACACCTACGTATTTTCTTCTGTATTCAATTTTATTAATGGATCATCTGATCTCCAGCTTTGCTGG
TTTAGAACCTCTGTGCTCATCTTAAGCTCCTCAAGGAGAAAAGGACTATTGTAATCATCTTTCAACGAGT
TTGTAAAAACAATTCCCCCATCACAGCACTGTGCCTCATAGGGTTTAAAATTTGACCGAATGACTGACTT
TACATACATCCTTCCCAGACCCTTTAGGACTACTGCTCCCCTAGAGGTTTTCTCTGCCCTTTGGAAAACA
GGTAGGGGAAGAGGGATCTAGAAATGGCAGTATTCATTAAGATAGCCAAAGCTTGATAGGAAGAGACATT
CATTTTACTGTGGTAATTAAAGTGAAAATGGGAGAATAAGAAGGCATGCTGCTTCTTTTTCAGGAGTCTT
GGCAAGGGTTCTAGTTTTAAAAGAAAGAGACACAGCCAACTAGATTGAAATGATGTGGAGTTCATCCCTC
CACAGTCATATTTTACTGAGCCATTTTTCAATAAATGGACTAAATTGTCCCTTGGAACTCAGTAGGTGGT
GCTCTTGTGCTATAGCATAGCATCGGCTTTGGAGAGGTTCTGAGAGCACAGCGGCTGGTTCCAGGGCCTG
TGTCCTGTCAGTCCCCTTTCATAGCTGCCAGGCACACACCTGGAGGGCATCACATGGCTGGTCTGGTGAG
AGGCTTTCTGTCTTTGGAAATGAGGGGGTGAATTAAGGTCTTTACCTTCTCTAGCCTGTCTGAGCTCTGC
TTTCCAGGGGAACCTAAATGAGAGGTTTTCTAACCTTTTAAAGAAAAAAAAAATGTGACTGTTTATCCAA
ACAATTACGATGTGTATTGTTACCAGTTTTCCAAGATTTTTTATATTGTTATTCATCTGTGATTCCTCAA
ATCAAAGTTCCTTTCCACATAACTCAGGGTATCATTCTTGTTTATGTTTTCCTTTATGTTAATGTTTGTT
TCCTGTTTAAGCTTCAGAGAAGATGCAGCAGAAAGAAATAAATATGTAGTAGAGAAATTTGGAAGTGATG
AAGGAATACAGGTGAAAGCCATCGAGTTCATGCAGCAGCTAGTAGTAACTTAGCTGACAACAGACCCTTT
TGGCAGGAGCCCATTGCTTTACTCCTTTTGCTATATAATGAGTTCCTTGGTCCGAAGTTGGTTGTGATAC
CATGATGGTGAATAAGGAATCCAGTCAAGTCCACATTTGGTGATGCTGGAGAAGTGTGGTGGGCAAAGAA
GATAAATTTAAATCCAGAGTGAGTTATCTATTACAAGGAGGACAAATCTGTTGCCTGAAGCATTTCAGGG
TCTGCTTTTTCATCAAGTTTCTGTAGGGGTTGTATAAAACGAAAGTTACTTCACCTATATCCACCAACTG
GTAGGGGAGAGGCAAAATGCTAGTGGGACTCACAGCCTGGATGTGCTGATCTGACCCATTCAGTCACCTG
TGATGTCGAAAGGCTACCAGCCAGGTCCGAGTGAGGCCAGGCTGTGGGGCCAGCAGCTGGGCTCCTGAGC
TGTGCTGCTGCAGATCCAGTGATGTGCAGTGTGTTTTGTCAAGACAGAGTGCTTCCTCTCCAGTCTACTG
TCTAGTATCTTGTGCACTGAGTTTTTAGGTTTTAATGACCGTAGTCCTGATTTACATACTTTGCAGTTGA
TTTTTTTTTAGCCATCTTTTAATTCTGCCTTTTCAATTTATACTTTCTTATTTTTTAATTAGCTTTTTTA
AAAAGCACCCTAAATATACTGATTTTTGTTGGTTTTAAAAATCACCTTAAATATATTTTGTTGGGATTAT
TTTAGTGTCTTAAGTATACTTTGTTAGGATTTTTTAGCATCTAAATATACCTATTTGTTGGACTGATTAA
CTTCATCTGAAGTGAATTTGTGATCTAATGTCTGATATTGTTAGTTGCATTTATTTCTTCATGTACTTTA
GAACTTTGGTTAAATGACATGTTTTGAATGAGGTTTTAAAAACTTTTCACTCATTCAGTCATTTTTCGCC
TCTTTCTCCCTCTCTGCACACTCTCCCCTGTGTAGCCTCATTCTGCTTGTCTCTGTCTGGCTTCCATGGA
GCCTGGGTGCAGAACTAGCTTTCACAGTGGGGGCTTAGTTACCTGGGCATTCATGGCTGCTTCACGCAGT
GCCTGGTCCTGCCTGACAGGTGTCCTCCATCCTCCCTAGACCGCCACTCCATAGGAGGCAAGGATGCTGC
GAGCCTTCCTTCAGGCATGGAGGGGTAGGGCTCTAGTCAGCACCTTCCATCCCACCTTCCAGCAAGGGTG
CTAGTTTCTCACTCTGTCGTTTGTGCCTCTGTTTAGCCCCCAACCCTTCTAAGACCCAAACCTACAGTTT
CATTGCCTGTTTTTGGACCCTAGCATAGGAGGGGCTGGCTGCTCATGGTTTTGTCCTCGGGGTCTTGCCT
CTTTGTGTTTCTGTCTCGTATCGATTTCATAGAAATGTTTATTTTGTGTGTGTGCTTGCCTGTATCCTTT
TCCTTTTTTCTTTTTATGTTTCCCCTCTCATTGCTGTATGTTTGGAGTAAAGAGAATCCATCCAAAAGTG
AATTTACCGTGCCATCTTAACTGGAAGTCACATGGGCAGAGAGTTTAAAGGAAAGAAAGATACTTGGTTT
TACATAGTACTGAAAGCTAACCACAAGAACGCTTCCTATGTGAGCTCAGTGACCCATAGCATATAGTTAC
TTAAACTCCGTCTGAGGCTTGCAGGCCCCAAAAGATGAGTGGGATTAGGCAGGTGGGATTTATTAGGGTG
CTATGGTTCTCTACAAAGGTTTCACCTTCTATTTTTCATTTTGGTGGTAATTTTTTAAAAATTCATAATT
CCACACACCTAAATGCCTGCAATTCTAACTAAGTAATGTCTTAAAATTTCAGTGCCTGGAGTTGTGTTTG
TATTGGTGCCAAGGAGCACTGCTTTAAATATAGGGAGATATTATAAAAGAACAGAGGTGAAAATGTAAAT
AACGTGTTTGAGCTAAGAGATTGCCGTTGCACAGTGGTTCTGAAGAGGAAAGTGATGCGTGAATTAAGCT
GTCTCCCTGCATGTGTTAGTATTGGCCAGTCAACAGAACCTGCCTGTCGGTACCAAGCCCTACATGGTTA
GTCCAAAGTGAGTTTCAATGACTGCATCATTGATCACGCTGAATTAATTTTGTCAATTTAAATTTTACTC
ATTTTGTAGATTTGTTGGTATTTAATTTGTATATTTTTTATATTGTGGTTGTGTAAGAGTTACAAGCATA
AAGGTTTTACTGGTTTATGTTTGTTAATATTTAACTAATAAGAAGAATGACTTTAGATAATACTGGGAGC
TCTCAACAGTTTTTAAGTTTGAGAACCATGGGTCAAATGGTAATTTAACTCTTGCTGTTGGTTGCAGCAA
GCACCTTGCATTTGATTTTGATGTCTTTAGCTCACTCCTGCTCATGCTTCCTGACCTGCTTAGCTCAGGA
TCGTTTCTCTCTGGGGACTCTGACACCTCCATGCCGGGCTGGTGCCCCTTCCTCATGCTGCCTGCAGCCC
CCTGTGTTTCCTTCTCTCCCAGCCCTTCCCACAGTGTAATCTGTGTATGGGTCCCAATTTCCTCATTAGC
CATAAGTTGCTTGAGAGTGGGGAACACTGTCATCTTTTTATTTGCAGTGATTTTCAGAGCTCTTGTCATA
AAATAGGCTCCTAATAAATGTATGGGTTTCCTTGTTTTTGTTTAGGTAGTAATAAATTACCTGTAGAATC
AAGGAGAGAAAGAGGCAGAAATAACTTGGAGCCAAGTCACAAGGCAAGAAGAAGCTTCCTAATATTTTAA
TAACTAATGTGTTCCTCAGCTCACTTTCTAACTGGTCTAACCAAAACCCAAGTCTTACTGTCAGGTAAGT
GAAGTGAGGACAAGAAACGCAAGGAAAGGAAGTAATGATTGTAATAGAATGCATGAGGGAAGGCTGGTAT
TTTTCAAGTCCGAATGATGGCTCCTTGGTGCTCTGATGGAGAACAAGGTCAGAGATTTCTGTCTTAGCAG
CCTCGATGGCAAGCGCTGTGGTGAAGGGATGCTTTTATTTTGAAGCCAAGTCCAGAGAATAGCTCCTCTC
CCCCCATTGCTGAGGTCTTGGGTGGGAGAATTGAGCCTAGTAAATCCCCAGAGTTATCTGCTAGATTCAG
TTTCCTTAATTCTTTGCAAAGTCATCTGAAGAGTATATATACATACTCTGCACCTGGATTGAAGTTGCCT
CCTCCAATTCCTTAGGCCCAGATTTTGTTTACAATTGAGGTTTGTTTGAAATTATCTGCAAATTTCAGGT
CTGTGTTTTTGATTAGACTATCTCAGAGGTGGAACGCCACTGACTCAACAGAGAAATAGCCAGCTCCTCC
TAGTGGAACTTTTCTTAAAACCTCATTGGTTTTAGGAGGAAAAATACCATTTGTTTCTTTCATAAGCACT
TAATGGGAACAAGAATCTTTTATTGTGACTTTCAAAAAAAAAAAAAAAGCCACAAACACAGGGGTAAATT
GACCAGTCTTACCCTGTGAAGTGAAGCAAAGAAACATTACATTTCAGCAAATTAAAAATAGTTATCAGGC
TTTCATCAAGGAAGAGGAAGAATCTTGTCAACTTAAGTGGAATTGAACATAAATTTCTTAATTTTATATT
TGATTATATTTTAGGGGGTTTTAAATATTTTCTGACAAGGTCATGGTGCCCCTAGTTGATGACATTGATT
GATTGGAAGCTAAGTATTTGATTTGTCTTTTTTTTCTTTTTCCATAATTAGTGTGTTTTGTAGCATTCTC
TCCATACATCTCCTGTTTGGTGCTTATTTCATGAGAGAAAGGACCTCATGCTGAGGGTAAATGGGAAAAA
AGTGCACTTTATCAGGTCGCCTCCACTTTGAGAAGCTTATATGGTCCATATTTGGCATGAGTAGACTTAG
CTCTCTGGGCTTAGAGATGTTTTAGACCAAAGGAAAGCATTCTTAGACTTTCTTGTCCCCCTGACAGGTA
CCATGTATAGCTACTTTTGTGTGGTTTAAAATGAGCTTTGTTTTAAATGTTAACAATCTTGGAGCTACAG
GGGTTTCTATCAACATAAAATCAGTCAGAATTTTATCTGTTTTATTTTTCTTCTACAACAGCCTTGTTGC
TTTTTTTATGTATTTATTTTCCATACATTTGTTCAGTACATATTTATCATGCTCCTACAATGTGCCAAGT
ATTGTGTGAGTTTGTGGGTTTCAAAATATGCTCAGCAAACTAGGTCCTGAGATGTGTCAGCTAGGATGTG
TTTGATTGCAAGTAACAGGAAAGCCAAAGAATGGTGTTAAGGGATTAAGCAAAAAGAGCAGTTCCACATT
TGGCTCCTTCATTGCCTCAACTATGCTGTGAGGACACGGGGCTGTGATTCTTCTTTGCTGTTTGCAGTAT
GTTGGCCAGTCCCCTCAGGTTTCCTTATCCCTGGGTCTCAAGGTGACTGTTACCGTTCTGAGTATCACAC
AAAGACTACTATGTCAGATATGGAAAAAAGTGAACTCATTTAAAACTGAGGAAAACTGAGAAACCTTTTG
TTGAAGTTCAGTTCTCATGCCCTATATTTCCATAATATACCTGTTCCTACAGTTTGATAGGCGAGCAAAA
GTAAATACCATGACTGGTCTGTACTAGCCATTCCCAAAATGTGGCTGAGGGCCCAGGGTCCCCGAGACCC
TTTTAGGAGGTTCACAAGGGTAAAACTATTTTTATAATAATGCTAAGCTGCTATTTGCCTTTTCGACTCG
CATTCGCTCACTAGTGTGCGGTGGCGTTGTCAAGAGGTTACATGATAGATGATGATGACCTCTCTCTGAC
AGCTAATGGAATGTGTGTTTGTATATTTTGTCTTTTTAATTGTTCTCAGTTTTAGTTTCTGGTGGTAAAT
ATCTATCTATCTATCTATCTATCTATATCTATATATATATAGATATATATATATATACACATACATACAC
ACACACACACATATATATATAAATAAAACTCTTTGGGGTCTTCAGTAACATTGAAGGATGTAAATGGGCC
CTGAGAACAAAACATTTGAAATTACCTGCTCTGTGTGAATCAAGATTCACCCCTGGCACTGGCGGATATC
CCAGTCTCCCTAAGACATATGGCCTTGAGATTCCTGGACAAAACTCTTAACAAAGAGGAAATGGAGAGCT
TAGGGCTGCTGGGTGGGCAACTAGCAGTGTGTGCAGCCCTGTTCTGAGGGGGCCCTGAGGAGACAGCAGG
GCAGGGATGCAGCATGTTCTCCAGGCCCCACCTCTGCTGGGCCAGCCAGGACTGGAGCCACTGTAGGTTT
GTCATTTGTGTGTTGTTGGTTTTTTAATTGTGGTAAATATAAATAAGATTGTAACCATCTTAACCACTTT
TACATGTAATTCAGTGGCATTGATTACATTAACATTGTTTAACCATTGCCGCCATCCATCCCCAGAACTT
TCCCGTTATCCCAAACAGAAACTCTACCCATTAAGCAGTAACATTCCATTACTGTCTCCCCTCATGAATT
AATTTGCCTCTGTGAATTTGACTATTGTAGGTACCTCATCTGTGTGGAATCAAAGAATATCTGTCCTTCC
GCATTTTGTCTGATTTCACTTAGCATGGTGTTTTCAAGATTTATTCCTGTATGTATCAGAATTACATTCC
TTTTTAAGGCTGAATGATATTCCAGTGTGTGCATATGCCACACTTCGTGTATCCTTTTCTCCACTGATGG
ATATTTGAGTTGTTCTCACTTTTGGCTGTTACGCTGCTATGAAATTGGGTGTACAAATATCTCTTTGAAA
CCCTGCTTTTAATTCTTTTGGGTATATACCTAGAAGTGGGATTGCTGGATCAATGGTAATTCTATGTTTA
GTTTTTTCAGGAACCACCATACTGTTTTTCGTAGCAGCTGCGCCATTTTACATTCCTACCAGCAGTGCAC
GAGAGTTCTGGTTTCTCTGTGTCCTCATCAACACTTGTCGTTGTTTTCTTGATAGTAGCCGTTCTAAGTG
AAGGGAGATGGTTTTCTGTTTGTTTTTAATGAATTAGGATGCATTGCCCCAGCCTGTCACCCAGCGTCTC
CTCCCTCTTTGTTATCTTTCTTCAGACACTGCTCAAGTGTTTTAATGCTTTTACTTCCTTCTGCTCTCAT
GAATTGTGCTTGGTGAGCTCCATATTCTTGTAAGGTACATTTTCCATGAAGTTTTTGAATATATCCTTCT
CCTAAAGGATAGAATTCACCAAAATGAGGAACCTTTAGTCCTGAGGTAATACTCTTTGTTGCCTGCTGTA
CTTTGAATCTGAGCCATGTTATCTCGGTGACTCAGACCATGAGCCCCTGTGGACAGTGGTGTATCTTTGT
ATCATGGCTATTTGAGTTCATAAAATAGTACTTAACAAGCAACCAAACTCTTGAGCAATTTATATGTGTG
AGAAGAAGGGCAATGGCAGTGGTCCTAAGCTGATGCCATTGTGAACTGGTTCCTTTTCAGTATCTTGGAT
GTTTGCATGGCCCCATGGCTGGTTTCCCTTGGTACTTTATCCCAGCCCCTCACCTCTTCCTGCTTCTGAA
GGATCCGCTCCCACCTGGCAGGAAACAGGGACAGGATCAAGCATGTGTGGGTCCTTCACTGGACACTGCC
TTCTGTTCCAGCGTCTGCATCTCTCTGCTCATACGACTTTGCTTTAGTCCCCTCTGCATAGGAATTTCTG
AAGGTCTTTATTTAATTTCTTTATTTTCTCCTGGAAATACTTACTGAGGGATCTAACAGCTTCTGTTGTT
TTTAGTCTGCATACGTGGAGAAGGTGAAATCATGGTTTGTTTTGATTCCTTAGGGACTGGGTAAATGCAC
TAAAAGATACATTATGCAAGAAATGGAAAAAGTGGATTTCCTTCTGATTTTTCATGCCAATTGCTTTTGC
TGCATTAGTATATGCTGTGCGTGTATGCACAAAATACTTGTTAACATCCTGAGTTTTCAGGAAATATGTT
ATAAAACATTTACCTTTTTTATTTCTTAAAAATGCTAAACAGTATTTCTCTAAGAGCTAGTAATGAAATG
AATTTAGGTACATACACTAGGCAGAATCATAAGAAAGTCAAGGACTTACATTTGGAGCAAGATAAAGGAT
TTTGGTATTGAGCAAAAAATATAGTCAGCTGTCAATTGTCTAATAGGTTTGTAGATTACCTGCGATAAAA
AAGTAGTACATCTGTGAAAAAAGTTGAAATTACCATAAATCTGAAGAATCAGCCCCATTTTTCAAGGCAT
GCATTTTTTGGAGCTGCACGGAAGCCACCTTATATGTCTGCTTCGGGTGACACTGTCTTATTCCTCCGTG
AATAATGAATTGAACGTCTCTCCCTCTTTGTGACAAAGCCCTCTGGGGCAAAGCAGTAGCCGTACAGGTA
AGATAGGGGGTCCAGACAGCAGGTTTTGGATTTTCCCCTCCTTAGAGCCAGGACTGGAAAAATGGAGTCA
TTATTTGAGGACTGGAAGGAAAAGGAGGGAGCAAGTGCTAGGACTGTTATCTCTGCCCATCCTGGTGGGT
GGTTTTAATATTTCCAGACAGAGAACTCAGTTAAAAAAACAAACAAACAGAAAATACATACTATTTCAAC
AATTTGCAAAATTTTGTTGTATTCATCAAGTACTGTCCATCTTTATTCACATTTATAAACTATAATACTT
TTTCCTTTTTTCTTTGCCTGTGGGGTGATGTCTTTATGGTAAATGTGTATCTGGAAGTTTTTTTTTTTTT
TTTATATTTTAAGTTCTGAGATACATGTGCAGAATGTGCAGGTTTGTTAGCCAGGTATACACGTGCCATG
GTGGTTTCCTGCACCCATCAACCTGTCATCTACATTAGGTATTTCTGCTAATGGTATCCCTTTCCTAGTC
CCCCAACCCCCTGACAGGCCCCGGTGTGTGATGTTCCCCTCCCTGGGTCCATGTGTTCGCATTGTTCGAC
TCCCACTTATGAGTGAGAACATGTGGTGTTTGGTTTTCTGTTCCTGTGTTGGTTGCTGAGAATGACGGCT
TCCGGCTTCATCCACGTCCCTGCAAAGGACATGAACTTAGCCTTTTTTATGGCTGCATAGCATTCCATGG
TGTATATGTGCCACATTTTCTTTATCCAGTCTATCATTTATGGGCATTTGGGTTGGTTCCAAGTCTTTGC
TATTGTGAATAGTGCTGCAATAAACATACATGTGTGCATGTGTCTTTATATAGCAGGATGATTTATAATC
CTTATATACCCAGTAATGGGATTGCTGGGTCAAATGGTATTTCTGGTTCTAGATCCTTGAGGAATCTCCA
CACTGTCTTCCACAATGATTGAAGTAATTTACACTCCCACCAACAGGGTAAAAGCGTTCCTGTTTCTCCA
CATCCTCTTCGGCATCTGTTGTTTCCTGACTTTTTAATGATCGCCAATTCTAACTGGCGTGAGATGGTGT
CTCATTGTGGTTTTGATTTGCATTTCTCTAGTGACCAGTGATGATGAACTTGTTTTCATATGTTTGTTGG
CTGCATAAATGTCTTCTTTTGAGAAGTGTCTGTTCTTATCCTTTGCCCACTTTTTGATGGGGTTGTTTTT
TTCTCGTAAATTTGTTTTAAGTTCCTTGTAGATTCTGGATGTTAGCCCTTTGTCAGATGGATAGATTGCA
AAAATTTTCTCCCATTCTGTAGGTTGCCCGTTCACTCTAATGATAGTTTCTTTTGCTGTGCAGAAGTTCT
TTAGTTTAATTAGATCCCATTTGTCAATTTTAGCTTTTGTTGCCATTGCTTTTGGTATTTTAGTCATGAA
GTCTTTGTCCATGCCTATGTCCTAAATGGTACTGCCTAGGTTTTCTTCCAGGGTTTTTATGGTTTTAGGT
CTTACATTTAAGTCTTTAATGCATCTTGAGTTAATTTTTGTATAAGGTGTAAGGAAGGGGTCCTAATTCA
GTTTTCTGCATATGGCTAGCAGTTTTCCCAACACAATTTATTAAATAGGGGATCCTTTTCCCATTGCTTG
TTTTTGTCAGGTTTGTCAAAGATCAGATGGTTGTAGATGGGTGGCGTTATTTCTGAGGCCTCTGTTCTGT
TCCATTGGCCTATATCTCTGTTTTGGTACCAGTACCATGCTGTTTTGGTTCCTGTAGCCTTGTAGTATAT
AATTTGAAGTCAGGTAGTGCGATGTCTCCACCTTTGTTCTTTTTGCTTAGGATTGTCTTGGCTATATGGA
CTTTTTTTTGGTTCCATATGAAATTCAAAGTAGTTTTTTCTAATTCTGTGAAGAAAGTCAATGGTAGCTT
AATGGGGATAGCACTGAATCTATAAATTACTTTGGGCAGTATGACCATTTTCATGATATCTATTCTTCCT
ATCCGTGAGCATGGAATGTTTTTCCATTTGTTTGTGTCCTCTCTTATTTCCCTGAGCAATGGTTTGTAGT
TCTCCTTGAAGAGGTCCTTCACATCCTTTGTAAGTTGTATTCCTAGGTATTTTATTCTCTTTGTAGCAAT
TGTGAATGGGAGTTCACTCATGATTTGGCTCTCTGTTTGTCTGTTATTGGTGTATAGGAATGCTTGTGAT
TTTTGCACATTGATTTTGTATCCTGAGACTTTGCTGAAGCTGCTTATCAGCTTAAGGAAATTTTGGGCTG
AGACAGTGGGGTTTTCTAAATATACAATCATGTCATCTGTAAACAGAGACAATTTGACTTCCTGTCTTCC
TATTTGAATATGCTTTATTTCTTTATCTTGCCTGATTGCCCTGGCCAGAATTTCCGATACTATGTTGAAC
AGGAGTGGTGAGAGAGGGCATCTTTGACTTGTGCCAGTTTTCAAAGGAAATGCTTCCAGTTTTTGCCCAT
TTAGTATGATATTTGCTGTGGGTTTGTCATAAATAGCTCTTATTATTTTGAGATACGTTCCATCAATACC
TAGTTTATTGAGAGTTTTTAGCATGAAGGGATGTTGCATTTTATCGAAGGCCTTTTCTGCATCTATTGAG
ATAATCATGTGGTTTTTGTCATTGGTTCTGTTTATGTGACGGATTGCATTTATTGACTGGCATATGTTGA
ACCAGCCTTGCATCCCAGGGATGAAGCCGACTTGATTGTGGTGGATAAGCTTTTTGATGTGTTGCTGGAT
TTGGCTTGCCAGTACTTTATTGAGGATTTTCGCATTGATGTTCATCAGGGAATTGGCCTGAAATTTTCTT
TTTTTGTTGTGTCTCTGCCAGGTTTTGGTATCAAGATGATGCTGACCTCATAAAATGAGTTAGGGAAGAG
TCCCTCTTTTTCTATTGTTTGGAATAGTTTCAGAAGGAATGGTACCAGCTTCTCTTTGTACCTCTGGTAG
AATTCGGCTGTGAATCTGTCTGGTCCTGGGCTTTTTTTGGTTGGTAGGCTATTAATTACTGCCTCAATTT
CAGAACTTGTTATTGGTCTATTCAGGGATTCAACTTCTTCCTGGTTTAGTCTTGAGAGGGTGTAAGAGGG
TGTATGTGTCCAGGAATTTATCCATTTCTTCTAGATTTTCTAGTTTATTTGTGTAGAGGTGTTTATAGTA
TTCTCTGATGGTAGCTTGTATTTCTGTGGGATCAGTGGTGATATTCTTTATCATTTTTTATTGTGTCTAT
TTGATTCTTCTCTCTTTTCTTCTTTATTAGTCTGACTAGCGGTCTATCTATTTTGTTAATCTTTTCCAAA
AACCAGCTCCTGGATTCATTGATTTTTTTGAAGGGTTTTTTGTGTCTCTGTCTCCTTCAGTTCTGCTCTG
ATCTTAGTTATTTCTTGTTTTCTGCTAGCTTTTGAATGTGTTTGCTCTTGCTTCTCTAGTTCTTTTAATT
GTGATGTTAGGATGTCAATTTAGATCTTTCCTGCTTTCTCTTGTGGGCATTTAGTGCTATAAATTTCCCT
CTAAATACTGTTTTCGCTGTGTCCCAGAGATTCTGGTACGTTGTGTCTTTGTTCTCATTGGTTTCAAATA
ACTTCTTTATTTCTGCCTTCATTTCATTATTTACCCAGTAGTCATTCAGGAGCAGGTTGTTCAGTTTCCA
TGTAGTTGTGCAGTTTTGAGTGAGTTTCTTAATCCTGAGTTCTAATTTGATTGCACTGTGATCTGAGAGA
CTGTTATGATTTCCGTTCTTTTGCATTTGCTGAGGAGTGTTTTACTTCCAATTATGTGGTCAGTTTTAAC
AGAAGTGTGATGTGGTTCTGAGAAGAATGTATATTCTGTTGATTTGGGGTGGAGAGTTCTGTAGATGTCT
ATTAGGTCCACTTGGTCCAGAGCTGAGTTCAAATCCTGAATATCCTTGTTAATTTTCTGTCTCGTTGATC
TGTCTCATATGACAGTGGAGTGTTAAAGTGTCCCACTGTTATTGTGCGGGAGTCTGAGTCTCTTTGTAGG
CCTCTAAGAACTTGCTTTATGAATCTGGGTGCTCCTGTATTGGGTGCATATATATTTAGGATAGTAAGCT
CTTCTTGTTGTATTCATCCCTTTACCATTATGTAATGCCCTTCTTTGTCTTTTTTGATCTTTGTTGGTTT
AAAGTCTGTTTCATCAGAGACTAGCATTGCAACCCCTGCTTTTTTTTTTCTTTCCATTTGCTTGGTAAAT
ATTCCTCCATCCATTTATTTTGAGCCTATGTCTGTCTTTGCACGTGAGATGGGTCTCCTTACAGCACACT
GATGGGTCTTGACTTTTTATTGAATTTGCAAGTTTGTGTCCTTTAATTGGGGCATTTAGCCCGTTTACAT
TTACGGTTAATATTTTTATGTGTGAATTTGATCCTATCATTGTGATGCTAGCTGGTTATTTTGCCCATTA
GTTGATGGAGTTTCTTCACAGAGTCGATAGTCTTTACAATTTGGTATTTTTTTGCGGTGGCTGGTACTGG
GTTTTCCTTTCCATATTTAATACTTCCTTCAAGAGCTCTTGTAAGGCAGGCCTGGTGGTGACAGAATCTC
TCAGCATTTGCCTGTCTGCAAAGGATTTTATTTCTCCTTCGCTTATGAAACTTAGTTTGGCTGGATATGA
AATTCTGGGTTGAAAATTCTTTAAGAATATTGAATATTGGCCTCCACTTTCTTCTGGCTTGTAGAGTTTC
TGCAGAGAGATCCGCTGTTAGTCTGATGGACTTCCCTTTGTGGGTAACCCGACCTTTCTCTCTGACTGCC
CTTAACATTTTTTCCTTCATTTCAACTTTGGTGAATCTGACAATTACATGTCTTGGGGTTGCTCTTCTCG
AGGAGTATCTTTGTGGCATTCTCTGTATTTCCTGAATTTGAATGTTGGCCTGTCTTGGTAGGTTAGGGAA
GTTCTCCTGGATGATACCCTGAAGAGTGTTTTCCAACTTGGTTCCATTCTCCTTGTCACTTTCAGGTACA
CCACACACCAATTAAACGTAGGTTTTGTCTTTTCACATAGTCCCGAATTTCTTGGAGGCTTAGTTTGTTC
CTTTTCATTTTTTTTTTCTCTAACCTTCTCTTCATGCTTTATGTCATTAAGCTGATCTTTAGTCTCTGAT
ATCCTTTCTTCTGCTTGATCGATTCAACTATTGATACTTGTGTATGCTTCACGAAGTTCTCATGACGTGT
TTTTCAGCTCAATCAGGTCATTTATATTATTCTAGTTAGCAGTTCCTCTAACCTTTTTTCAAGATTCTTA
GCTTCCTTGCATTGGGTTAAAAAATGCTCCTTTAGCTTGGAGGAGTTTGTTATTACCCACCTTCTGAAGC
CTACTTCTGTCAGTTTGTCAAACTAATTGTCCGTCCAGTTTTGTTCCCTTGCTGGAGAGGAGTTGTGATC
CTTTGCAGGAGAAGAGGCATTCTGGTTTTTGGAATTTTCAGCCTTTTTGTGCTGGTTTTTACTCATCTTC
ATGGATTTATCTACCTTTGGTCTTTGATGTTAGTGACCTTCGGATGGGGTTTTTATGTAGACGTCCTTTT
TGTTGATGTTGATGCTATTCCTTTCTGTTTGTTAGTTTTCCTTCTAACAGTCAGGCCCCTCTGCTGGAGT
TTGCTGGAGGTCCACTCCAGACGCTGTTTGCCTGGGTATCACCAGTGGAGGTTTCAGAACAGCAGATATT
GCTGCCTGATCCTTCCTCTGGAAGCTTCGTCTCAGAGGGGCACCCGCCAGTTGCCAGCCGGAGCTCTCCT
GTATGAGGTGTCTGTCGACCCCTGCTTGGAAGTGTCTCCTTGTCAGGAGGCATGCGGGTCAGGGACCCAC
TTGAGGAGGCAGTCTTTCCCTTAGCAGAGTTCAAATGCTGTGCTGGGAGATCTGCTGCTCTCTTCAGAGC
CAGCAGGCGGGAACGTTTAATTCTGCTATAGCTGCGCCCACAGCCACCCCTTCCCCCAGGTGCTCTGTCT
CAGGGAGATGGGAGTTTGATCTATAAGCTACTGACTGGGGCTGCTGCCTTTCTTTCAGAGATGCCCAGCC
CAGAAAGGAGGAATCTAGAGAGGCAGTCTGGCTACAGCGGCTTTGCTGAGCGAACATCCCTGCGGCTTTG
TTTACGCTGTCAGGGGAGAACCGCCTTCTCAAGCCTCAGTAATGGGGGACGCCCCTCCCCCCACCAAGCT
CAAGCATCCCAGGTTGACTTCAGACTGCTGTGCTGGCAGCCAGAATTTCAAGCCAATGGATCTTAGCTTG
CTGGGCTCCTTGGGAGTGGGATCCACTGAGCTAGACCACTTGGCTCCCTGGCTTCAGCCCCCTTTTGAAG
GGAGTGAACGGTTCTGTCTCGCTGGTGTTCCAGGTGCCACTGGTGTATGAAAAAACTCCTGCAGCTAGCT
CGGTGTCTGCCCAAATGGCCGCCCAGTTTTGTGCTTAAAACCCAGGGCCCTGGTGGTGTAGGCACCCAAG
GGAATCTTCTGGTCTGTAGGTTGCGAAGACCATGGGAAAAGCGTAGTGTCTGTGCTGGAATGCACCATTC
CTCACGGCACAGTCCCTCACGGCTTCCCTTGGTTAGGGGAGGGAGTTCCCCAATCCATTGTGCTTCTTGG
GTGAGGTGACACCCCACCTGGCTTCTGCTCACCCTCCGTGGGCTGCTCCCACTGTCTAACCAGTCCCAGT
GAGATGAGCCGGGTACCTCAGTTGGAAATGCAGAAATCACCTGCCTTCTGCATTGATCCTGTTGGGAGCT
GCAGACCAGAGCTGTTCCTATTCGGCCATCTTGCCAGCCTGTGGAGGTTTTAAAAACTATTTTTTAATTG
TAGAAAGTAACATATTGAAAAGCATATAAATACGATTTATACTTTGGTGAGTTATTAAAATGTGGATAGA
TAGTCATTGCCACACAGGTCAGGAAATAGAATATTGCCAGCATCTTGGTGCCATTCTTGCACACCTTCCC
AATAGCACATCTTCCTTTCCTCTAAAGCAGGGTTCCCCAAGCCCCGGGCCACAGACCGGTACCAGTCCGT
GGCCTGTTAGGAACCAGACCATACAGCAGGAGGTAAGTAGTAGGCCAGTGAGCATCACTGGTTGAGCTCC
GCTCCCTGTCAGATCAGTGGCGGCATTAGATTCTCATAGGGGCATGAATCCTCTTGTGAACTGCACATGC
AGGGGATCTAGGTTGCACGCTCCATATGAGAATGTGACTAATGCCTGATGATCTGAAGTGGAACAGTTTC
TCATCCCACAAACACATCCCCCCCATCCCTGCCCCCGCCCTGGTCCATGAAAAAATTGTCTTCTGCAATG
GGAGATGGGTGCACCAGAATCTCACAAGTCACCACTAAAGGACTTACCGTGTAACCAAATACCACCTGTT
CCCCCAAAACCTATGGGAATAAAAAATTTTTTAAAAGAGAAATATCTGAAACAGTAATTACTGAGAATTT
TCCAAGTTAATGTCAGACACCATACCACTAATACAGGAAGCTTTCTTATTTTGAATGGAAGCCGGAAGAA
AAATGCACTTTACCTGTAGAGGAGCAGAACATTCAACTTCTCCTCAGAAACCATGTAAGGAAGAAGAGAG
TGGAGTGAAATATTTAAAAATATTGATTTAAAATGTTGAGAGAAACACCTTACATTATTAAGAACATGAG
CTCAGATACCTCTAGGGATCTAGATTAAGAGAGCCTTTGAATGACTGAGTTCTACCTGTCAAGACTCAGA
TTCCCAGCAGGGTCAGATATGCCCAACAGGTGTGATCATCCCACATGTGGCCGATGGCACAGGGTACTTT
AATTAACCAGATGCTGGCAGCAGCCATCACCCACACTCCCTGGTCATCACAACTACAGCACCATGTTTTC
ACCCCTCCCAGCCCCAGAGGTTGTGGAGCAGCATATTGAGGATCAGTGCACTGCATGATTCCTAAAGCTG
TTTGCATTTAAAACAATCAGATACATTTCTATTGCTGAGCGAAGGTTGTTTGCCTTTTTTTCTTTTTTAG
ACAGTCTGGCTGTCTCACACAGGCTGGAGTGTGGAGTGCAGTGGTGCTATCCTAGCTCACAGAGGCCTTG
AACTCCTGGGTCCAAGCGATCCTCCTGCTTCAGCCTCTAGAGTAGCTGGGACTATAGGCATCTGCTATTA
TGCATGGCTAATTAAAAAAAAAAATTTTTTTTTTTTAGAGATGGGGTCTTGGTATGTTGCCCAGGCTGGT
CTCAAACTCCTGGCCTCAAGCGATGCTCCTGTGACCGCCTGCCAAATGCTGGGATTACAGGCATGAGCCA
CTGTTCCAGGCCTGCATTTTTTTTTTTTTTTTTTTGAGACAGAGTCTCGCTCTGTTGCCCAGGCTGGAGT
GCAGTGGAGTGATCTCGGCTCACTTACAAGCTGTCTCCCAGGTTCATGCCATTCTCCTGCCTCAGCCTCC
TGAGTAGCTGGGACTATAGGCGCCCACCACCACGCCTGGCTAATTTTTTGTATTTTTAGTAGAGATGGGG
TTTCGCTGTGTTAGCCAGGATGGTCTCAATCTCCTGACCTCGTGATCCGCCCGTCTCTGCCTCCCAAAGT
GCTGGGATTACAGGCGTGAGCCACGGCGCCCAGCCCCGGGCCTGCAATTTTATTTGAATAAAATGTTTGT
CTCTTTTATCAAAAAGTTCTTCATTTTACTGGGTTCCCAAATATCTAAACTGATCTGCATCTAGTGCCAT
ATGAAATATATAAGAAATTCATCAGTTTGTTAGTTTCTTCAGTTTCTTTGTTTCTTTTTTTTTTCTTTTT
TTTTTTTTTTTTTTTGAATCAGTCTCACTTTGTCTCCCAGGCTGCAGTGCAATGGTGCGGTCTCGGCTCA
CTGCAACCTCTGCCTCCTGGGCAAGTGATTCTCCTGCCTCTGCCTCCCAAGTAGCTGGGATTACAGGCTC
CTGCCACTACGCCCAGCTAATTTTTGTTATTTTCAGTAGAGATGGGGTTTCACCATGTTGGCCAGGCTGG
TCTCAAACTCCTGACCTCAGGTGATCTATCCACCTCGGCCTCCCAAAGTTCTGGGATTACAGGTGTGAGC
CACTGTGCCCCGCCTCTTCAGTTTGTTTCTTTAAGGACACAGACTTTAGAGCCAGACCCTGGATTCATAT
TCCACAATCATAGCTCTGCTGTTAACTAGCAGTTACTTCCTTTCAGTTTTTACATAATCTTACTTTGGGC
AATTATGTAATCTCTTGGTGCCTCTGTAAAATGGAGATGATAATAGTACCCATTTCATAGTGTTGCTGTA
ATGATTAAATTAGTATGAATAAAGTATTTAATATATTGCCAAGAGCATAGTGTAAATGTATGCAAGTATA
AACTATTATTATATTTATAAAATGAGATATTACTAATTAAATTTCACACAGGCAACATAAAAATACCTTA
AAATTTTTTTTGGTGGGGAATTACCTTTTAAAAATTAAATTACTGGCTGGGCACGGTGGCTCATGCCTGT
AATCCCAGCACTTTGGGAGGCAGAGGAGGGCGGATCACTTGAGGTCAGGAGGTCGAGACCCGCCTAGCCA
ACATGGTGAGACCCCGTCTCTACTAAAAATACAAAAATTAGCCGGGCGTGGTTGTGTGTGCCTGTAATCC
CAGCTATTTGGGAGGCTGAGGCAGGAGAGTCGCTTGAACCCAGGAGGTGGAGGTTGCAGTGAACCAACAT
CGCACCACTTAACTCCAGCCTGGGAGATAGAGTGAGACTTCGTCTAAAAAAAAATACATAACATAAAAAT
AAAATTAAATTACTTCATCTGGAGAAGCGTTTTGCTGTGGCATTTAGCTTAGAACTGTACTATGAGGAAT
ACCGGTGAATTATTCATTCCTTAATTCAGTATTTTTTGAGTGTTTGCCAGGCATATGCTGCATTCTAGGA
AGACAGGGAATTTACACACCAGTAGAGGAAGCGGTAACTAAGTGAACGAATAAAGCCCAGGATAATTAAC
TGGAATCAGCAGAAAGGATTTGTTGTGTGCATGAAGCAGATGAGAGGCATGGGCTGGACCGTGGTGAGCT
GGGGAGAGAGGAAATAAGGGCTGTCAGAGACGGTGCTGGAGCCATGTTTTGCAGGGTCTTCAAGACTCCA
GCAAGCAGCTGGGAGTATCTACGGGGAGTTTAAGTTTCTTTTCAAGGAAGCGTGAAGAGAGGTTTTACCC
AGGGGAATGTGCTGGTCTCATTTACATTTGCTAAAGTTTTTTCTGTCTACTGCATAGAGAATGAATTGGA
GACGGGCAGGCCCAGCCTGGCAGTAGACAAGTGCAACACTCCAGGGCTAGGCTGAGGGGTGGCAATGAGG
TGGAAGGAAGTGCATGCAGTCAAGTCGGATCACACACATTTATTTTGGTGGTAGACTTGACAGGTGGTGA
TGATAGCTTGGATGAGGAAGACAATGAGGAGGCATGGACATTATCTAGATTTTTGGCTAAGTGCCATTTT
GACAGTTGCATATATTCCCTCTATTATTAAACTTTCTTTTCATTTAGACATGATCCTTCTCAAAACTGTA
AATGTTCTAGTGTGTGTGCTGCCCAAGTGAACATGAAGACTGCACATTTTTTAGGTATTTTAAAACTTTC
CCGATCTAGATTTTTTTGCACTGCAGCCAAATTGTACAGTCGTTTCAAATTTCTTCTTTAGTAATGGGAA
CCTCCTTTGTTGATATCTTGGGTATTTAATTGGGAGCATTTTACCTGTTAATTATGGTTGTTGAGGATTT
TAAACTCACTTTATTTACCACTAGTCTTTTGAAATTACATTGCTGAATATCCTGCCTGCCCTGGGGAGTG
TCAGAGCCTGTGAAGGCCTGCACCTGTTGAGAGGCAGCCTTCCCTCCTCTGCGATTCCTGCTTCTGGCTT
CCATGGGTGATGAAGGGTTGTGGGATGGGAGGGGCAGCTGGAGCCGCTGAGCCAGCTCCACCTGAGTCTC
ACTGTGTAACTCCATTGTTCTTTTTAGCATGGCCTTCAGGGGTAGGAAGTCAGGCTTATGAGATTTTATC
TACTGTCACTGGGACTAGTATACCTCCTCAGTAAGTGGAATTTATTATTATTTTACTAAAATATGGTTTC
TTCGTGTGAATGAAGTGAGATCAAGCATATAAAGCAATCTTTAGTTAAAAGATTGCTTAAATTGTTACAT
GTGGAATAAATTATTTTACTTTTTTCTAAGAAATGAAGAGAAACTGGGAAAAAAATTCGTTAGACAGTAA
TGCATAGAGATTTTTTTACACCTAAATGAGAAGCCAGAAATTCATATAAAACATAAGAACTTCAAAAACA
TTTCTTAGGCACAGACTATTATTAAACACTCATGGATGTTTTTTATTTTCTATTACATTAAAATACTCAA
GTCAACTTCATATTCAGAACATTTAAAAATAGCTCAATCTTAAAAAGAAGATATAAAGTATTATCAGCTG
TGCTTTTTGTGCATAATTAGCGTGTGCCTGTGGAGGTATAAAGACTTCTAGCCTAATGATAGTATCATGA
TAAAAAGTTCAGATGGTAAAAATTGGAGCTCCAGCTGGATGACATATTTTATAACAATTCAAAGATGGCT
CCAGCATAGAAGCCATGCTATTTTAGTTCTTTGTAATCCCTCCTTCACCCATCAATGGGTCGTGAAGGCA
CTGATAAAAGAGCCTTTTAGAAATGCTTCTATTTGTTCCCTTTCTTACAGATTTAATGTGTGCCGACCAT
TTCCTTCAGTGCTGGACAGGCTGCTGTGAAGGGACATCACCTTTTCGCTTTTTCCAAGATGGCTCAAGAT
TCAGTAGATCTTTCTTGTGATTATCAGTTTTGGATGCAGAAGCTTTCTGTATGGGATCAGGCTTCCACTT
TGGAAACCCAGCAAGACACCTGTCTTCACGTGGCTCAGTTCCAGGAGTTCCTAAGGAAGATGTATGAAGC
CTTGAAAGAGATGGTAAGTAGTGGACCAGAATAATGAAATTATTTTCTGACTTCAGGGACTCTACCAGAT
TTCACCAAGACAGAATGCCACCCAGAATCGGGACTTGTGGTATTGACTGAAGTGCCGATGGATTAGGAAG
ACAAATTACTCAAGAGCTGGTTTCCTAGTCTCCGATTTATTATATTATTATAATTTCTTCTTGAGTAGCT
GTATTGTTACATGACACTTCCTGACCAAGCAAGTTGTTCTTAAATAATCAAGATTTCATGCTTGTTGTCA
AGTAGTAAATGGGATTCTTTTGAAGGCCTTTGTGTCCCTTGAATCTTGGAGAATTTGCTACATGCTTAAC
CCTTCTTCAACCCTCTTGTCAAGTGGGCTGTCCTAAGAGATGATAGATATTAAGATCTCTTCTTATAATA
CTTTTTATAAATATTAAGATTTTGAGTATCTTTACTATTATATAATTTATTATTTTCAAAATTTAATATA
TTTTCATTTTGATGTCATGTTTCTTTTATTATGATAGATATTTTTATGATTTAGCACATGTTGTTATATT
ATGAGCTAGTATTTTGTATTTAATTTCAAAATGAAAAGCAAAATTGTCACTTAACAAAGTGTTCTTGTGT
TAAGCTTTTCTTCCCTTAATCAAAGAGTAAATAGGAAATTTGAAGAATAATTTGTATTGATAATATGAGT
TCATATGTCTTTAGAAACTATAAGGAAAGATACAGTCTGTGTGAACAACCGATGCTAATTTTTAGAATTG
TTTTTTTAATGAGACATACGTAACTTGACCTTTATATGGTCCCAAAAAGTGTAGGACCAGGCTTGATGCT
GGGACACATGTGAGAGATGTTTTGCTGCAGTAGCAGAAAGTGCCCATTGTGTCGGCTTACCTGCATGTTA
TCCTAGTTTGCTTTTATTTTTGAAATTTTATGAAAGGTAACAAGTGGAAAAAGGTCCGGTTGTACAATAG
CATGCATGTGTGTTTTTAAATCTTAAGCTGTTTTCTATTTGGTTGATCCTTTTTCTATTTCAGGGTTTAG
ATTGTTACAGACTATGATGTCATTTGCCATACAGTACTCAAAATAGTAATAAACAGATATATACATTTAT
GCTTTGGCTGCTTTTATTTCTTTTTACAAGTTCCAGAGTTCTCATCCCTTTAAACCTTCTTCTTTGAAAT
AGTCTTACTGGAGCTGAGTTCGTAACCTCTCTTATGTTAGAATAAAAAAACCAGGATAAAGATACGGGAT
TATATAGTTATTAATCACCAATAATGTGTTTTCAACTCTTAAGCAGTCTTTATTATTTTTAAATAAAGTA
GCCTTTACTGACTATTAAGTATGAGTAGAATTAATTTTGCAACACAATTGATTTTACCTATGTCATACAT
CTTAGTTTGGTGACCCCATTTAAGGATGAAGTAAGTTGGTTGGTTGCTTTTTAAACTTTATTTGAATTAC
TTACCTAAAGATCTTCTCTAATCCTTTTGTGCTTACTTTTAAAAATGGTATACTAAACAAGAAGCATTCA
CGTTCCCTCAATCTATAATGTCAGTTCAGTATTTCTAAGTTGCATAATGCCTTTACTGACCAAAATTTAT
TTTTCTTTCACAGGATTCTAATACAGTCATTGAAAGATTCCCCACAATTGGTCAACTGTTGGCAAAAGCT
TGTTGGAATCCTTTTATTTTAGCATATGGTAAGAATCAAAAACGTGTCCTCTCAAAATGGCTATTTTAAT
CTTTGCATTGTTTCACAGAGGCTTACATTATGAACCTTTCTCCTAGTTTTTTTTTTTTAATGGAACAACT
TATCAAATGTATTCATTGTTCTATTACAAAGATGGCTTCCTATACTGTTGTCCATGTATGTGTGTGTAGG
TTTGTATAGATAAACACACACACACACACACACACACGCGTGCACGCACCCATGCAGATCTTCAGGAAAA
TAGAGCTCTTCGTATTAGAGGACAGAAACTCCCAGATGATTTAAATATCTACTTTTGCCTGTAATCACTT
TCATAACTTCATTTTAAATTCAATATAAAATGGCTATACTAATGATACCGAGTTAATTTTGTTTCACGGT
TTCATAACTCACACACTCTTTCCCATGTTGTAAAGTCATTCTTCAGAGTGTGAATCCTGCCGTGACTTTG
CCTTTGACATTGGCTGCTTTGACCTTATTTAAGGGTGCCATTTTGGTTTTATCCAAGGTGGAGATGAATG
TGGGGGCACTTTGGGGAGGTATTCCTTCACTGAGCTCCTGTCTGCTGTCCAGTCTCATTTCCTGTTTCAT
CTTTCACAGCTATACCTCATGGTGGTAGCCAGGTCCTATTACTAACAGTGCCTGAAGGCACTTTGTGTCA
GGATTCCTTTCACACTCATTCTCCTTTGAAATAGCCTTACTGGCCTGAGGTAGGAGCTGCTGGGAGTGTC
TCCATGGCCTCCAGCATCTCCCTTTAATACACTTACTTCACTGTCTGATGCCCTGGGAAGACAGCATGCC
TCTCGAGAACAGGAACCATGGTTTTAGTTCTCTTTGTTGTCCTAGGGCCTCCCAAGGAACATGGCTGAGG
TTTGCTTTGGATTGACTGTATTATTAGCTAATGTAATATTTACTTTTAAGATTTTTTAAAGTCAAAGACT
AATTGCATAATATAATGACATTAGAACCCAAAATAAAATGAATATTCCCCTTTGATGTTTTAAAGAATCA
TGCAGTTTCCCATTTATAGGTTGTCATAATCATTATTGGAAGAGACGTGAACTAGGCAGGAAAGGGACAA
TATGTGTGTTTAGCCCTGTGAGCAGGCGTGCGTGGACGCCCACACACTCAGCCTCCCTCACTCTACCCCA
CCCTCGTATGTCCCTCCTCCTTCCCACTTATACCTCTTCCCCCAACCCCTAAACTTCTTCAAGTTCTTGA
TTCAAAATGGCAAAACCAGTGAGGCAGCAATGTGTTTGCCCACCAGGACCACGCTTACCTGTCCTAGGTT
TATCTATTGCAGTTAGGTCAGTGTTTCTCAGACATCTTTGACCAGAAATACATTATGTATATGCATATGC
ACGTGGATATGCACACACACAGTGAAACACATCTCATGAAAAAATGCATACAATGGCACCCCCCTTAGAC
TTTCTGCACTTGCAGTTACTCACAGTATAGTACAATAAGATTTTGAGAGAGATGGAGAGATCACATTTAT
GTAACTTTTTTTTTTTTTTTTGAGACAGAGTTTTGCTCTTGTCAACCCAGGCTGGAGTGCAATGGCACTA
TCTCGGCTCACCGCAACCTCTGCCTCCCGGGTTCAAGTGATTCTCCTGCCTCAGCCTCCCAGGTAGCTGG
GATTACAGGTGCCTGCCACCACACCCAGCTGATTTTTGCATTTTTAATAGAGATGGGGTTTCACCATGTT
GGCCAGGCTGGTCTCAAACTCCTGACCTCAGGCGATTCACCCGCCTCGACCTCCCAAAGTGTTGGGATTA
CAGGTGTGAGCCACCGTGCCTGGCCTAAGGGTTTAACAATGACAACAATACAATAAATCAACTGTAACAA
TATAGTGTAGTACATAACTTCTATTACACTATATTGTTACAGTTGATTTATTGTATTGTTGTCATTGTTA
ATCCCTTGCTATGCCTAGTTTATAAGTTAAACTTTATCATAGGTATGTGTATAGGAGAAAACACTGTATT
TAAGGTTTGGTACTATTCTCAGTTTCAGACATCCCCTGAGGGTCTTGGAATATTTCCGCCATTGATAAAG
AGGGACTATTGTATTATTATTCTGTGCAGTCCATGTTCACTATGCTGTTCATAGTGAATGGTGTTCATGA
CCCGAGACTGGATTTCATAACCCTTGATGCTTCTTGACCAGAAGTTTGAAGAACATTGATCTAGGCCAAT
ATCGATGGCAGGAAAAAGGAAAAGAAATTGTTGAATGACCTTCATTTGAAAGCAGTACCCATTGTTAGGG
GCTTCATGGATTTATTAATTGCTTTTTAGAAAGAAAGAAATATTACGTCCTTTAAATGTACATCGTGGAT
GTAATACATCCTCAAGTCAGAAATGTGAGAAACGTGGGGAGGTTTATGATGTCGTGTGAGAGGCATTGCT
CACTTTGAGCTGGGCACTGTTCTCTGTGGGCTACATAATGGACCTAATTAATTCTTGATGACAGTGTTGC
AGGGTAGATAATTATGGATTAGAGTCAATAAGTCGCTTTCCCTAGAATACAACACTAAGAAGAGCCAGAA
CCCCACTCCTCATGTGACTTTAAAGTCCACCTTCTGTAATGTTCTGTCCCTATTGGATCACATCTTGTGA
TCGAAGTGTTCCAGTCTTGGCATTCCCACTAGCCAGCTTCACTTGCACATACATATTAATTCAGCAGGTA
TTTACCAAGTGTTGGGTTTTTTTTTTTTTTTTTTTTTTTTTTTTTTTTTTTGAGACAAAGTCTTGCTCTG
TTGCCTAGGCTGGAGTGCAGTGGCGTGATCTCGGCTCACTGCAACCTTTGCCTCCCAGGTTCAAGGGATT
CTCCTGCCTCAGCCTCCTGAGTAGCTGGGACTATAGGCACCCACCACCACATCCAGCTAATTTTTTGTAT
TCTTACTAGAGATGGGGTTTCACCGTGTTAGCCAGGATGGTCTCAATCTCCTGACCTTGTGATCTGCCTG
CCTCGGCCTCCCAAAGTGCTGGGATTACAGGCGTGGGCCACTGCACCCAGCCTACAAAGTGTTTTTTTGT
GTGTGCCAGCCCTTAGGAAAACGCGGCTCACTGTCTCTGCCCATTAGGAGCTTCCAGTCAGGGAAAAAGA
GATACTTAAGCAGGTCAGCCTGACTCAATGTGATGGTTCTCTGAATGGGAGTAGCAGTTGCTGAGAGGAA
GGAGGGTTTCTCAGGAGAGCCCCTGCTGGGGCAAACTTGAAGATGTGATTCTCTAAGACAGGGCATCTGA
ACTCGTGGGGTCTCATATTTCTTCTTTGTAAAAGTAGGAGTTCAGACTGATTTATTCTGGTGTCCTTGAA
CTTGTATCTGTCTGTGATCTTTCCTTAGCACCTTATCTGCATTACCTTGGCCCCTCTGACAACCAGAAAC
AAATTCTCCATCCCTTTCTGTCTCAACGCTTGTATTACCTTTTGAACTGCTCATAAATTTCAGTTTCCTG
TTGAGGTATGCCCTGGCTGTGAGCTCACAGAGGTGGCTGAATGGCATGAAACTCCATTAGCAGTCAGATG
TTGCCTGTGTCGCCCCTGTTGTTTGACTAGTTGGGCGCTTTCTTCCTGGAAGGGATCTTTTCTTATGGTT
TTATAATATCAGAATTGCTTTTTTTTGAGATGGAGTCTCGCTCTTTCACCCAGGCTGGAGTGCAGTGGTG
CGATCTCGGCTCACTGCAAGCTCTGCTTCCTAGGTTCACGCCATTCTCCTGCCTCAGCCTACCAAGTAGC
TGGGACTACAGGCGCCCGCTACCACGCCCAGCTAATCTGTTTTTTTTTTTTGTATTTTTAGTAGAGATGG
GGTTTCACCGTGTTAGCTAGGATGGTCTTGATCTCCTGACCTTGTGATCCGCCCACCTCGGCCTCCCAAA
GTGCTGGGATTACAGGTGTGAACCACCACGCCTGGCCCAAAATTGCTTTTTAATTACAGTAAAAGCAAAC
AATTTTCATCATGGAAAAAAGTAAGTCATATGTAGTGTTCATGGAGAATAGGATCAGAAAAGGGTAATAA
GGAAGGAGGGATGATTTGGAAATGAAAAGATACTGAAAAGAGAAGAGACAAAATAGATAATAATGGAAAG
TTAGAGAATACCTTTTTATTCGATGATGTCCTCAGCATAAAAATACTGCCTTCACCTTCTGAAATTCTGA
TCCATTGCTTCTAACTCTGCCCTCACGATTAAGCATGACAGCTGTTACCTCTCTTCTTCACTATTCACTA
TTCCTGTATAACAAATTTCTGCCAAACTTAGCAGCTTAAAACAGTGAATATTGTCTTAAAAATTTGCTGC
CTTCATACTTTTAAACTATAGAATTAAAGTTTAAAGAATTGCTTTAGCTTTTATGTAGAATTTCAATTCC
AGATATCAAAAAATAAAATACAAGATGGCAAGTGTATGTTGTTATCTTCCTTTCCTTTCCACTCAGTTTT
AGAATCCAAATTTACACTAAGATGGGCTGTCAGTGACTGTCCCTGCAGTGAATCCCAGGCAGTTTCCCAT
CTCACTTAACATGCCCTGTGGGATGCTCCAGCCTGAGCTCAGGGCCTCCAGGGAGGAGCCTGACAGATGC
CAGCCCCTGGAGTGAGTGCTGGTGGCACTTGTGAATAACAGTCCATGGCTCATGTTTGTAAATTGCCTAA
GCAAAGCAAACTGTAAGCTCATTAGCAGTGCATTTCAGTGCATTGACTCTGGGCACAGAAAGTCACCTCC
TACAGGTTGGGTGGAAGTTTCTCTGGCTCCTTCTCTTTTTTTATTTTTCTCCCAAAAAATAAAATTTTGG
GAGAAAAATAAAAAATAATATACCTTTTGAACTAAGTTTGCATAATCACTCAACACCTGGGGAAACTCCC
AGTTTTGGGTATTCTTTTAGATTTAAGCTTCATAAACTCATAAACTGACATTTCCTTTCTTTTTTTTTTT
TTTTTTTTTTGGTGGTGAATGTCTGGTTTTTGGAAATGCTCTCCATCAGATTACATTCTTTTTAACACCC
TGCTGCATGCGTAAGGATGCCATTGGATGCATCTGTCACACTTACTACATGAAGCTAGGTAGAATTTCTT
CTAATATTGAAACTATGGGAAGCATAACAGTCACATTTTTAATTAGTGGCATTGGTTAAACCTGAAGAAT
CCTAGAATCTTTAGTGGTTAAATTATACGACTCTTGAAATGAACTGATCTCAGGCAAGCCAGTGCTTTAT
AATGCTTTATTTGAGCTCATAAAAGCTAGGGGAAAAAAATGAATGGCCTCAGAATAACCCCTGATAAAGT
TTTTTCAGAGATGTTAGTTATTGGAAAAGCATAAGCTATGTATGTTCACAGGGAAAAAAATGGGTTTAAA
AATTACTGTTAGCATTATTTAGTTTGTGGATAAAAATACAGAAGTCGCTTACTAGAGTTGGTATTGTTCT
TATTTCTTTGTTAATGAAGTCCTTAGAAATGCTGGGTTTTGGCCAGGCACGGTGGCTCATGCCTGTGATC
CCAGCACTTTGGGAGGCCATGGCAGGAGGATCACTTGAGCTCAGGAGTCGGAGACCAGCCTGGGCGACAT
GGTGAGATCCAGTCTCTACAAAAAATACAAAAATTATCCGGGTGTGGTGGCACACACCTGTGGTCCCAGC
TACTCAGGAGGCTGAGGTGGGAGAATCGCTGGAGCCCGAGAGGTGGATGTTTCACTGAGCTGAGATCATG
CCACTGCACTCCAGCCTGGGTGACAGAGCGAGACCCTGTCTCAAAAAAAAGAGAAAGATTGGGTTTATTA
GATTGCAGAAGATGAGGTGGCAGAGAGTACTGATTCCAGGCACCGGCTGTCTTAGCCTCACCTCCATGGC
CTTGTAAAGTCTGAAGTTGCTTTGCCCTAGCTCGGGTACTGACATCTTCAGTTTCTAGGCCCCATTTTTG
TTTCTTAATTGTGTTATAAAATCATCCGCTGGAATAGACTCAGTCACCACAAAAGGAGAAAGAAAGTAGC
TCATCAAGTAGATGTTCCTGCAAAATGTAAGATTTCAAAGTTCAGATTTTCATTGCATGTTTGGTAAAGT
TTTATAAAGATTTACATTTTAGAGTAAAAGAGCATGTAAGAGACTTCTATTTTATCCAAAGCACTTGGTA
CTAGAAATATATTTTAAAACAATCCTTTTTATTAAATTTCTTTTTAACAAGTGGAGCTATTTTGGCAAAT
TAAAAAATTAAAAGATTAAATCACAAATACTGGCTACCAACTGCCTATAACCATTAAGTTGCCTTAGAAA
GGTCGAAATTACTAACCATTTGAAATGTGAAAAAACTGATCATGAAAAAAGCCCAGTTCTCTTAGTTCTT
TCCATCATTCTCGTTTGGCTTTAAAAATTGATACTGTTACAGAAAGGAAATTGACCACACAAGAGTTAAG
TGATCCCAAGGCCACAAGAAGGACAAAACCCCACAAAGTTAAGTTTAGGGAATTCTGAAGGACAGCTAGG
AGAGCAAAGATAGAGTGAGGGAAAATATTCCCATCAGCAGAAAGAGAATGTGCAAAGTATGATGGCGAGA
AAGCAAATGTTATATTCAGGGATACTTGTTCTGTGAACTTAGTAGTTTGAGATTTTCCTAAATATAATGT
TTACAGTGTTTTTATATTAATGATTTTTTCTGCTTGATAAAACTTATTAAGTTTTCCTTTTTGTAGATGA
AAGCCAAAAAATTCTAATATGGTGCTTATGTTGTCTAATTAACAAAGAACCACAGAATTCTGGACAATCA
AAACTTAACTCCTGGATACAGGTAAGAGAGTAAATCTTGCTCTGCACTTCTTTGAATTAAATTGATTATT
TAAAAGTGCTGCTTAAAAAAATTTTGGGGTGGGGTGGAATCCAGTTCTATGATGTTTTAGAAACTTTTTC
AAACATACCCTTCACTGTTACATTATCTTGCTGAGTAAAAAGTTTTTCAAGAGATTTCAATTTTGCTTGA
CTGTGAATTCCAAAAGATACCAGTCTTTAGGATGAAGACCTAATGTTGAGTGGTTTTGAAAAGTTTCTTT
CAGGTGATTAAAATAATGTATTCCATTTCACTCTAGCAATTGCTATCCTTCAAAAAATTGTTTTTCCCTA
TCAACCTGGTTTAAATTCCTTTCCACATGCTTCCATGCCTCTCTCAAAATCTATTTTGTAGTGAAATGAA
AATTCAGCAGTGCGGCGGGAGCAGCACTCTTTATTTTGTGTCCCGAAGTTGGTGCCTGAGCCAGCATATG
CACAGACTGGATCTTGGTGCTGCGCAGCCTCTGCTGCTCACTCACACTTTCCAGTTGGCTACCTACTGTG
CTAGTCCAGATAGCTGACAGCTTTCTAGATTTCCCTGTCTGCTTCTACTTTCTCCTGAAGGGTAGGCATA
AGGTAGAGATGTGGTGAGGCTGGGCTGCAGCTGCCCTCACCAGCAGCGCATTGGCTGTTCTTTTCTGTTC
CCCGCACTGCCTTGCTGCAGCAACCCCAGGACTGGCTGATGCCTGTCAGACTCCACTTAGTATGCTTGTG
GTTCAGATCAGCTGCTTAGTATTATGAAATCATCCAACCAGATTAGTGCATATGGTTTTGTCTATCAGTC
TGACTGGTGATATCGTTACATTCACTGCTTTTTACGATTTCTTTGTTTTAGACAAAATTGCTAACAGATG
ATGAAGACAGTATTTATATTTTTCTGTTTGAAAGATAGAAGGGAGTGAGAGGGATTGGGCAATGGAAGGA
AAGAATACAAACTTTAATTGGAAGGAAAATTAATGTAAGGAACTGAAGAAAGGAACAGATAAGTAGAATT
AGGGAAGAAAGAATGTGTAACAAGGCTGAAGAAACAAAATGACATATTTAGTCCTTAATTTTTTTAATTG
TTGCTTTTATTATTTGATATTTTAATGAATATTTAGCATATAATTTTGTATTAGATAGCTCATTGAGTCC
TGAAGTAGGCCATCTAATGAAGTGTTTTTAGAGTGACTGGATTAACTTTCTTCATTTAACTCATGACTTT
ATTAGCCTGTTTAAAAATTTCTAGCCTCACATTTTATTGTTTTTCTTGTTTAATACTATATCTACTTACT
AGTAGGTACTTATTAAGTATAGTTCAGGGAGTTAAAACACTTAATCTGTGCCTTCGGGGAATTCCCAGAC
TGGTAACCAGGTCACTCCAGGGCAGCGTGGTTGAGTTATTGCTAAAGCTGTGTTTAGGTGTGACGCTGAC
GTAGAGGGGGACACTTGCTCTGACAAGGGGGTTTGGAGACATTTCCTGGGGCAGGTGACGTGTTAATTGA
ATTCTGAAGAACAGCTAGGAGAGCAAGGATAGAGTTAGGGAGAATATTCCTGTCAGCAGAAACAGACTAT
GCAAAGTATGGTGGTGAGAAAGCAAACGTATTCAGGGAACTGTGGGTACTTAAGTGTGCCTGGAACTTGG
GGTTTTGTGGAGTTGGTGATGAAGCATGAAGCCAGAGAGACCAGCAAGCACAGTCCTTGCATATGACTAT
AGAAGGTTTTTATCTTGATGACAGTGGGGCAGCCACCAGAGTATTTAAAACAGAGAAATCATGCCTGGGC
GCGGTGGCTCATGCCCCAGCACTTTGGGAGGCCAGGGTGGGCAGATCATGACGTCAGGAGATCAAAACCA
TCCTGGCTAACATGGTGAAACCTTGTCTCTACTAAAAATACAAAAAATTAGCCAGGAATGGTGGCACGTG
CCTGTACTCTCAGCTACTAGGGAGGCTGAGGCAGGAGAATCGCTTGAACCTGGGAGGCAGAGGTTGCAGT
GAGCTGATATCATGCCACTGCACTCCAGCCTGGGTGACAGAGCGAGACTCTGTCTCAAAAAACAAAAAAA
AAGAAAAAAGGAAAAAAAAAGCCAGAGATATCATGTAGCCAGTGTGAGTTTTAGAGACTAACAGCAAAAG
GAAGTTGGTTGGGAAGAGGGCAAGGATAGACGTTGGAAGCTATTGTAGTGATAAGTTGAGAAATTGCGAG
GGCCTCAAAGAAATGGAGAAGGGGGCCCGATTTATAAGATATTAATAAGGCAAATACCCAGAAGGTATAA
TGGCAGATTAAATGTCGATACACTTAGGCATAGCTGGAAATGTACAGAGAGCAGGTGAATATCCCATTGT
CAGGAGAGCAAGCTGATTTGCTGGCAGAGGATTGAAAGTCAGCCACCTGTGGGAATAGTGGAAGCCTTAG
GTGAGGTAAGGTCCGCTCCCAGAGAGTGCTGGGGTAGGGGCCCAGGGGAACTAGAGAGAGCCTTGGGGAG
ACACTGACCTTAAGGGGAAGTGGAAGAATGATTGATGCTACAGAATGTAAGGAGGGGTCCAAGAAGTAGA
AGGAGAGAAGCAACGGAGAATGAGTGCTCATTCATATCTAATGCCATACAGCAGTGCTGTCCAGTAGGAA
TAAAATACATGCTGCATAGATAATGGTAAACTTTCCAGGTGCTGCTTTAAAAAACATAAAAAGAAATAGT
TAAAATTAATTTTAAGAAGATATTTCACCTAATTCAGTATATTCCAAATACCATCATTTCAACATTTAAT
CATTATTAAAGTTATTGAGATTATTTATAATCTTTTTCATGATGTATCTTTGAAATCCACTGTGTATGTT
ACGCTAACACTTATATCTACGTGTTGTATCTTCATTCAGATGTTAAATTTTCTTTGGAAATTCTTGATCT
GTATTTAGATTTTATAAAATGTAGGGTTGAAAAAGTAGATTCACATACCCAAGTTGTTCCGAGGAATTTT
ATAACTGAATCAAGTATCGGTATTTAAATTAAAATTGAATTAAAATTAAATACAAAGTTCAGTTATTCCC
TGGTGCTTACTGCACGGCAGTGCTCTGCAGCCACATGTGGCAGGCGGCCGCCGTGTTGGACAGGGCAGCT
GTGGAGCATACAGCAGAAGGATCAAGAAACACTACTTGGATTTAGCCACTGTGAGCAAAGACTCGGTGAG
GAGAGGTTTAGTGAGAGGTGGAGGGAAACAGCCAGATTGCTCCAGATTGAGAAATGTTGAAGAGGTGAGG
AAGCAGAGATAATAAACTTCACTCTTTCAAGAAACTTGGCAGTAAAGGAGGGAGAACTTTGGCAATGAAG
GGGGTGATAGCCAGACTAGGGTGGGGTTGGCTGAATTGAGCAAGTCCCAAACATGCTTTACATTGAGATG
AATATGTGGGTAGGGAACAGGTGAGGATATGCGAGGTTGGGAAAACAGTTTCCTTCCTCAGTTACCAAGC
AAGCCTGAACTAAATAACATGAACCGATAAAAAGATGTCTAGGAACATATTAATGATTTAACTCTTAACA
ATTTATTAACATATTAATTATTTAACTCTTAACAACTCTAAAGCTAATTACATTGCCCATCATCAGTCAG
TACATACATAATCTCATGTTGGCTGTAAATGCAGCAAGATAGAAGATAGTCTGTAGGTTGGTTTATAAAT
CAGTTCACATCTCCGGTATACTTGATTTTATCTTGGAGGTGATATTTTCTTCATGGAGGTTTTAGAGTGA
CATAGTATCTGTTAAAGATGTGTACCTTGACATCCAATATCCTTGTGAAAATTATAAAACAGCCATATTT
TAATGTTTGCTAATTCATTCAGCAAGCATTTATTAGGGCCTACCATGTGCTAGGATGTTCTAATTGTGGT
AATAAAATCTTGGGTCATTCTGTGTTACTGGAGCATTACAAGTATGATTGAAATACTCTAAATCAAAAAC
TAAGAATTTCTACAGTAAATTACAAAATTCAGTAAACATTCAAATTAATTAATAAATTTGAAAATGATAG
ACTGAGTTGTATTTTTAGCACAGAGAAGAAATAATTCTGTTTGACACTTGACATGTTAGCATGTGTTATA
CTGGAAACACATTGATAAAATGTTTTGGAGTTTTACTGACAACCTTGAATGTGCCATCATAGAGCACCAC
CTCAACAGCTCTTCTTACAGTTCAGAGACGAAGTTCCGGGACTCTTTCATGTATTTTGGGAATATGTGGT
CTTGAAAAATGTAGTTTTACTGGTAAATCCACTGAACAGATACTTTTTGAGCACCTACTGTTTGCCAGGC
ACAACTATAGAGGCTGAGGATACAGCACTGGACCTAGAAAGACAGTCTGTTCTCAGATGCTACAATAGAT
GGGGAAGGTTTCCAGGGCCTGCCAAATGTAAGAGGATGCCTGTCTTCTCTGGCAAAACCATACCACTATT
ATTTTTTGATTCTGATAGAAAGAAAAAAAGACAAAAAAACACAACAGGGTACCAGGAACAGAGATCAAAA
GGTGTTGTATTCTATCTGTATTTTCTTTCGAAATGCAATACTAAGCAATATCCAGATAGCGTCTGTCCTC
TACTTTCTTCTTTTTTCAAAAAGAAAAAACTTATAAATTAAAAAATCTAACAGACTTACACAAAACATAA
ATGCCAAGCTTAATAAATTGTGACAGATCCTTGTAATCACCACCCAAGGAAATAGAACAGAACATTGACT
GCTCCTGGATGTCCCTGCCCCCCATGTGCCCCTTGTTGCTTTTTTTTTTTTTTTTTTTTTTTTTTGAGGT
GGAGTTTCACTCTTGTTGCCCAGGTTGGAGTGCAATGGCGCAATCTTGGCCCACTGCAACCTCCGCCTCC
TGGGTTCAAGCAGCTCTCCTGTCTCAGCCTCCCAAGTAGCTCAGATTACAGGCATGCGCCACCACACCCA
GCCAATTTTGTATTTTTAGTAGAGATGGGGTTTCTCCATGTTGGTCGGGCTGGTCTCAAACTCCCGACCT
CACGTGATCTGCCCACCTCAGCCTCCCAAAGTGCTGGGATTACAGGCGTGAGCCACTGTGCCTGGCCACT
TTGTGCCTTATTTAAGAAATTTTTCTGCAGTCCAAGGTCATGAAGATCTTCCATATTATCTTCTAAAAGC
CTGTTGGTTTCCTTTTCCTATGTAAGTCTGTGATCCACCTGTAACTTATGGTGTGGTGTAAGGTGGTAAG
TAGTCCATTTTCATCTTATTTCCACGTTGATGTCCCATTGCCTGACACCGTTATTGAAAATCATGATCTG
TGGTGCTACCTTCGTCATGCATCAGGTTCCTTTGGGTGCATTTCCCACTGATCTGTGGTGCCACCTTCAT
CATGCATCAGGTGCATTTCCCACTGATCTGTGGTGCCACCTTCATCATGCATCAGGTGCCTTTGGGTGCA
TTTCCCACTGATCTGTGGTGCCACCTTCATCATGCATCAGGTGCCTTTGGGTGCACAGGTGTGATCCTGC
ATCTCTCCATTGGTTTTGTTGTTTATTTATGGTATTAATCTTAGTATCAACTTGACTGGACACAAGGTCC
TGGTAACATTATTCTGTGTGTTTCTGTGAGGGTGTCTTGGGGTGAGATTAACATTTAAATTAGTTGACTG
AGTAAAGCAGATTGCCCATCCTAATACGGGTGGGCCCTATCCAGTCAGTGAGAGACCTGACTAGAAAAGA
AGGCTGATGCTCCCGAGTAAGAGAGAAGTCCTCCTGCCTGAAAGCTTTTAAACTGAGACATTGTCCTTTT
TCCTGCTTTCACACTCAGACTGAAACGTCACCTCTTCCCGGGTCTAAAGCCTGCTGGCCTTCTGACTGAA
ACTATACCGGTGACTCTCCTGGTTATCTGGGCATTTGCTCTCTTGTGTCTCTGACTTGCTGGCTACTGTA
ATGGTGTTAGCTGATTCCTTATAATAAATCCCTGTGTGTGTGTGTGTCTATCTTATTGGTTCAGTTTCTC
TGGATAACTGACAAATATACTATATTTATGCCAGTTCCACACTGTCATCATTAATGTGGCCTTGTAAGTA
TCTTGCTATCCAGGAGGAAGTTCTTCCATCTTGTTCTTCATCAAGACAGCCTTGGCTAATATTGGAACTT
AGCATTAACTGTTACATAAATTTTAGGATGTGTGTGTCAGGTTTCACTAAAACACAAAATAACTTGTTGG
CATTTTGATTGGCATTGTGATTAGTCAGTTTGGTGAGAATCTCAATGGCCACTATCCTCTAAGGCAAAAT
TGGTTTTTCTCAGTTTTGTTTACTATTAGCAAATTGAACAGTACCTGGCACGGCATAAATTTTTGAATAA
ATTAATGAATATATGATATGCATAAATGAATTAAAAGTTGTACAAATTTATTTTTTCAGATAATCTTCCT
GATAACTTTGAAACATTTTTGCCAACTTTTAATTAGCATAACCTTTTAATGAGGCTGATGATTCGCTTGC
AGAAGTGTCTGTGCTACCATTTCCCAGTTCTCTTAGGTTGCATTCATAGTAGTATTTTTAATCTCTGACT
TCTTTGCAGGGATCTTTTGAAGCCAGGTGTCCATCTGATGGTTCCTTTAGTTAGATAGCATAATCAGCAG
ACCTTCCTTACTGGTCACATGGAGACCATAATGCATATCCTGAGAGGAAGTGGGAACCGGAGGGCTCCTG
CCAGCCCTCTGTGAGGTGGAATCCCCACCCTTCCCTCAGGGTCCCACTTGGACTACTTGTGACACATGAC
CATCTATAACATCTAGACTGGCTAAGGTCGTAGTGTGAGTACATTTGTGAAATATTAATAAAGCTTGATT
TCTTCTTACATATAAATATTCTAATGTTGTTTTCACATCTCAGTGGACTATCTTGTGCACTACTTGGAGT
ACACACCCCAACTTTATTAACCAGTAATAAATTTTGATAAAATCCACATTCTACCTTGGTATATGCAGCT
TCTCTTCATCTTTTCTCAACCCTAATATCTCCATTTTCCATTTTTGCATCCACATATCATGAAGGCCACT
CCCTGATCTTCCCAGATCCTAGCATCTTGCTGCACTAGCTCCAGACATGCCAAACCTATGCACAGATTTG
TACTTGGCAGAAATTTTCTTTCCTCTCCTTGGAATGGTTTTATACCCTTACTAGCCTGGCCTGGCTGAGA
TATGGAAACCTAGGGAAATAATTATTGTTCAAGTTTGAATGGCAATTTAAAAGGGAAAATAAGATGATTA
GTGAAAAATAGCAGAGGCAAGGTGAAATTCAGAGATGAGGCCAGGGATGTTAGCGATTCCTCTTCCACAG
CTCCATCTACTATTTTTATTACTTTTAAGTAACAAACACATTACTGATATTTTTTTTCTACCTGCGTTCT
ATTTGCTTGACTTTCTACAACCTCAGGGTTTTTTTTTTTAAAGATTAATTGATAATTGAATTTTTGTATT
TGCCTGTATAGGGGATATTTATTCATTGCTTTTCCAGTATCCATCTCCCCTCCTTTCCCGCCTTCTTAAT
AGTACCCTGAATTTCCCAGCTGTGCATGATTCATTCTGGGTGAGAGGTATCTTATGTGGCTCCTGGAGTG
GGTCCTACCTGGCTTAACCAACACAGCTTCTCTGTTCCTCTGGCCACACTGGTTGGTCAAGATGAGCCCC
GTCAAGGCTGATGAGATTCAGGGCTGTAACATTTGTTTGCAAGATTGGGAAGTGGATTGTATCTTTCCTG
ATGAACATGAATTAAGTAGCACATAATCCCTGAAGTTGCTGTTGGTCATGTGGAACCATGAGATCAGAGC
GTCTCTGGAAATGGAGTTAGTCCTGACAAAACATAGCTGAGAAAAACAGCAAGAGAAAACAGGTCATATT
CACATTGTGTGGACCCTGGATCAAGTCTTTTCCAGGCATAAATGCTCGAATTTCTTTCCTTTTCTATTTG
AGCTGTTTGGTTCAGGATTTTGTTACTAAAAGCCAGGAGTGTTTTGAGATAACATTGTTTGGGGCATAAA
AAAACATTTCTTTGAAGGTTTTTGAAACTCAGGGACACATGGACACAATTGCAAGAAAAAAATCTTATTT
ATTCAAGGATGTTATGAATAAATAGTGAATTTAATAAAGTACTTTCAGTTTCTTAAAAATTGCTCTAATT
TGTATTTGTTTTTTCACTGCCATTCATTGTAGAAGATATATGCATTCAATAAGGCATCCTTCTTCCCAGC
CTCAGTTAATTTTACTCCTTTGCACAATCCTGAAGTGAGTTCATAATATATGTTTGTCACTGATATGGTT
TGGATCTGTGTCCCACCCAAAACTCATGTTGAATTGTAATCTCCAATGTTGAGGGTGAGTGGGGCTTGGT
GGGAGGTGATTGTATCATGAGGATGGTTTCTCACAAATGGTTTAGCACCATCCCCCTGGTACTACTAGTT
CTTGCGAGGTCTAGTTGTTGAAAAGTGTGTGGCACCTCCCTTGTTTCTCTTGCTGCTGCTCTGGCTGCGT
GACATGCCTGCTCCCCCTTCACCTTCCACCATGATTGTAAGTTTCCTGAGGCCTCCCCGGAAGCCAAGCA
GATGCTGCAGTGCTTCCTGTACAGCTTGCAGAACCACAAGCCAGTTGAAGCTCTTTTCTTTATAATTACT
TCATAAATTATTCATTGCCTCCATTACTCAGTCTCAGGTATTTCTTTATAGCAATGCGAGAATGGACTAA
CACAGTCAGTCAGCTTATGCTCATTTCCATGGTTGCTGAAATGGCATAGACCCAATAATTGGAGGTCACC
ACAAGATCTTGGCAAAAGAGAGAGTGGCCTTCAAGTAATACCTTTATTCCATGTTATAACTTACCAAATA
ATAAATAAGTTTCTTTTTAAAATATCCCTCTCTTTGATTTGCACCCTCATAAGAATTCCTCTTTAGGTTA
ATCACGAACTCTGTTCTCCACACTTGGAACTTTCAAATATAGGATTGTTGCAGGACTTTTCCCTAGTTCA
GCTAAGGACGGGGTTCTTTATCCCATGGCCATGAAAATTCAGGCTTGTAGACAATTTGAATGGTGAGTGA
GACTGGGTTTTATTGGGTGAAAAGGAAGAAAATGGGGAGACAGGGGCTCTCGCTAGACCAGAGTCCCTGC
TGGAGTGCTTCCCGCCTGCCATTCGAATCCCAGGGTCCTCACAGGAAGAGGAGGGGCCAGGCGCCTCCCT
GCTGCAAATGTTGTGAACTTCCTGAGGCTCCACCTCAGTCAGTGGGCAGGCTGGTTGGAGTTTCTCCAGG
GACCCCTGTCACCTGGCTGTCTCAGTATGACCTTGATGTATCATTTTTAGGAAACGTGTTTGCAACCACC
ATTGAAAAAGTAACATAGTTTGGATATTTTATGGACTTGGTTTTTACTTTCTGCAAATATTGCATATAGA
TCTCAGAAAAGTAAAACAGAAGGAGATAAACTCATGGTCTAAAATAGTATTTGGTATGACAGTGGAATTC
AAAGGTTCATACTTGAAATTGAACCTAATGCAAGATCAGACTGGTAAAATGGAGTGAAGTTACAAAAAGA
AATCTGATAATGAGAGGTGAAGCCAGCTGGACTTCCTAGGTCAAGTGGGGACATGGAGAACTTTTCTGTC
TAGCTAGAGGATTGTAAACGCACCAGTCGGTGCTCTGTATGTAGCTAAAGGATTGTAAACACACCAATCA
GCACTCTGTAAAAACAGACCAATGAGCACTCTATGTCTAGCTAAAGGATTGTAAATGCACCAATCAGCAC
TCTGTAAAAATGGACCAATCAGCACTCTGTAAAATGGACTAATCAGCAGGATGTGGGCGGGACCAAACAA
GGGAATAAAAGCTGGCCACCCCAGCCAGCAGCGGCCACCAGCTCACTTGGGTCGCCTTCCACACTGTGGA
AGCTTTGTTCTTTCGCTCTTCACAATAAGTCTTGCTGCTGCTCACTCTTTGGGTCCGCACTACCTTTATG
AGCTGTAACACTCACTGCGAAGGTCTGCGGCTTCACTCCTGAAGTCAGAGAGACCACGAACCCACCATAA
GGAAGAAACTCCAGACACATCTGAACATCTGAAGGAACAAACTCTGGACACACCATCTTTAAGAACTGTA
ACACTCACTGCGAGAGTCCGCGGCTTCATTCTTGAAGTCAGCGAGACCGAGAACCCACAAGAAGGAATAA
ATTCCGGACACAATAAGGTTAAATAATTTTGCATTGGAAACTGGTTCTTTATTCATCCATGGGCCAGATG
CAGCATAGAAAGCAAGGTATGTGCTTCCAAAGATATCTCACCCCTGAAAGGAACCTTGAGCTCTCGAAAC
CACTCACTGGTATGAGGAACAGTTAGATTGCACTCCAGGTGGTGGTGTGACTGCACTGCAGCCGCACTAC
ACCGCACGGAACCCTGGCTCCTCAGACAGACCTCTTTCACTAGGCTGGAACTGCTGGGGACGGCACAGGG
CTAAGTCTTCATTGTGGCTTTAAAGAAATACCTGCATTGATTTCTGAATGGCAAACTTAAAAAAATTTTT
TTTTTACTGAAATAATTAAGGAAGCAACCATTTAAAGAGGATTTGTCAGCTTTTCAGACATTATATTCCG
CAGAGTTGGGCCATGTCTTTTTGTTCATGTTCTTTTTTGTTTTGTGTTGTAACTCATAGCAGGCACAAAA
TAAAAAACTACTGAATGGATAAAATTATTTAAAATTTAATAATTCAGAATTTTTTCCCTTCTCTTTTTCT
AAAAGGTAAGACTACCCAGAATTTTGTTTTATTTTGAACTGATCTGTTACAAGATCACTGGAAAGAGCCA
TGAAAGAATTACAATGTGTGTGTGTGTGTGTGTGTGTGTGTGTGTGTGTACATGTGTGCACACAAGCACT
GACAGGTCCTAAGTCCACATCTCCAGGTCGAACCTTTCCCCTGAGCCCCACATTTTCAGCTGCCTGTGTG
ACATCTCCACTTGGGTGACCATGAGTATCTCAAACTAAACATGTTCCAGATTAATTCCTGATCTTTTCCC
CAAAACTTTATTCTCCCTCCAGGCTTCCTTAACTCAGTTAAAAAGCAGCTTCATTCTTCCTGTTTCCTCA
GGTCAAAAGCCCTGGCATCATCCTTGGCTGCTCTTACTCTCCCATCTCACCTCAAGTCTATCAATCCATC
CAGTCTGTTGATTTTATCTGTGACACGTGTCCAGAATCTGACCACTTCCTACCAGCCTCACTGCTTCTAC
CCCCATCCACGCCACTGTTGCCCTCTCCAGGAACATTGCAGTATCTTTGTGTGTGCTCTCCTAGAGTCTC
AACCAGAAGGATTTTTTTTTTTTTTTTTTTTTGAGAAGGAATCTCACCCTGTCGCTCAGGCTGAAGTGCA
GTGGTGTGATCTCAGCTCACTGCAACTTCCACCTCCCGTATTCAAGTGATTCTCCTGCCTCAGCCTCCCA
AGTAGCTGGGATTACAGGCGCCTGCCACCACACCCAGCTAATTTTTGCATTTTTAGTAGAAATGGGGTTT
TGCCATGTTGGCCAGGCTGGTCTTGAACTCCTGACCTCAGGTGATCCACCTGCCTTGGCCTTCCAAAGTG
TTGGGATTACAGGTGTGAGCCATCGTGCCCAGCCAAGAAGGATCTTTTTAAGTGTCTCTGTTCAGGAGCC
TCGGGTAGGTTCCTGTCTTATTCAAAGTGAAATGCAAAGTCCATGCTTGGCTCATGAGGCCCTCTGTGAC
CTGGCTGTGGGGTGTTACTGATTTTCTCTCATATTCTCACTTCTCTCAGCCACAGTGGCCTCCTCACTAT
TCCCCATGTGTGCCCAGCAACTCCTTCCTGGGGTTTGGGGGTTTAAGCATCTGCCTTCACTGCTCCTCTC
CGAGAACAACACTGCTCCTCTGGGTACCATTTGGGTCACTGCTGGATGTCACCTCCTCATGGAGGCCTGC
CTCATCATCCTGGGCTAGACCCTCACTCTCTTCGCTTGCACGCGGTCTTAGTGCTCATCAGCTCCTGACA
TGCTGGGTTTTTTTCTGTCTCCCCATTACCTCCCAACTAAGTTACATGTTCCATGAGTGCAGAGACCTTC
TTGTACAGGCTAGGATAGTGCCTGGCACACAGTAAGCGTTCAGTGATTATTTGCTGAATCAGTAAAGAAA
TGAATAGGAATTTTTGTGGCAAAATGTGGTGGGATGAGGAGAGGGACTTCCACATGGAGAGGAGAGAATG
GACAAAGTTGACCATGGCCAAGAAATAGTGATCACTCCAGTTAGGCTGGAGAATGAGGTACCTAGAGGGA
GAAGTTAAGGTTAGAAAAATAGTTTGGGACGCATTTTGGAGGACTGTGAGTTTGTTTATAAATTAATGGT
GTGAGGCAATAGTGCTGCGAGAGTGTTGTAATGTGGCACCTGTCATGCTCCGCATGCCCCTGCTTCCGCC
CTGGCTCCCCTCCCATCTTTTCTTCATCCTCCATCCCTCATTTATTCCACAATTGTATCCTGAGTGCCTA
CTGTGTACAAGCAGGTGTTGGGGATGGAAAGGTCTTGCCTTTGAGGATCTGGTGATTTTATTGCATTTTA
CCAAGTGAAGGGGTGGAACAGCATGCAGAAGGCGCTGAGGTAGCCAGAGGGAAGGGAGAGACACTTTGTT
GGAGGAGTGCAGAGAGGTTGCAGGGGTGGTTAAGAGGCTTCCAGAGGGGAACAGTTGAGTTTGCAACATG
AAGAACAAGGCCCCAAGTGAGCAGAGGCTGAGGGCCTGTATGGTACTAGGAGACCTGAAAGTGATTTGAG
GTGTAGGCAGAGAGATAGCTAGAAACGTTCTTCTTGCTAATGATAAGAAGAATGGCCATCTCATTAATCA
AATGTTAGGTACTCAAGAAGGTTTAGCTGGGCCTGATCCCAATGGGCCACTTGGCCCGTAGTAAAGAATT
CACTTAACTTGGAAGGCAAAACTTTTAATTGAAAGGGTTTAAATGGGGGCTGGGGGACACATATGTAAAT
ATAAATCAGATGGTGGCTTCTTTGTTGAAAATACGTTCAGCACAGTGCAGGAGGGCAGGAATTGGCAGGT
TGAGATGTTGGAGAAGTGGGAGTGGAGCAGTGGAGGATAGCGTTAGGTTTTAGGAGACTAATAACACTTC
TGTCAGTCGTCTCCTGTCTTAGGAACTAGTTGAGAATAAGATACCAGAGGCAGGCAATTGGACAGTTCCT
TTACACCTAAACAGATTCAAGAATGTAGCTTGTGTCTGTGGTTTGGTTGGCTCCTCTGGATTTAGTAGAT
AAATCCACCAGGCACTGGTGAGCTGAGCCCCCAGAGGCCTACCTGGCTGGGACTGAGCCTGCCTGGCCCA
GTATGGTGCAGCAGTAGGCCAGGACGCATCCTTTCTGCAGGCAAGGCAAGTTGGAAAGACAAAGGAAAAA
GGACCTATGGCGGGCAGGGCATTTTAAATTTTCTCTCCCGAACTGACCAAGTAGATCATTTCTCTTAGAG
AGGAGAGAGAGTGGGTTGAGAGATGATGTCATAGGTCGGGCTCTCAGGAACTCTGACTTTGAGATGGAGA
TTAGTGTTCAGGGAGTGCTTTGGGGAGGAACAGCTATGGAGTAGAAAGGAAGGAGACAGGACTGTGCAGA
GGAAAAAGTTTAGCTGCACTGCAGTCTCCACAGAACCGTCAGCTGTGCCTGTGGGGGTAGAAGCGAGAGA
CCCCTCAGAGCTTTCCTGTGCTGGGACGGGAGGGCTGGACCTTTGTAGCTCTACATCCATCAGTCCTTGA
GATGTGGCCACTATGGGATGGGGGTGTGACCTTGGGCAAAGCAGAGACAGCTGAATATGATATGGTTGTC
AAATCACAACATCCTTCACAGATATTGCACTTGTTCCTCCCCTGCTTTGCCCTCCTGGGGAGTGGGTGGA
CATTCTGTCTTTGGGAACCTGGGCAGTTTATTCTGTCTTCTCTGGGAACCCGGGCAGTTTGTCTTCCTCT
AAGAAGGAATGCCGAGGTTTTGTGGTTGAAGATAGACCTTTCCCTGAGAAGTATAAGGGGAAGATGTGGT
GGGATCCATGACAGAAGTCACTAGAATGTGCGAAAGGGAGGAGCAGGAGACAGCGCATCCCAGCAGCTGC
CCTCACTCCTGTCTGCCGTGTTCCTGGGCAGCTACCCTCACTCCTGTCTGCCGTGTTCCTGGGCAGCTGC
CCGGGGAGACGCTGTCTTCTCCTCTGCCTTCCTCACTGCCTTTTGGTGTCCTTTTCCATCCCTAGAGCAT
AGATCAGGGACTACAATAAAGTTGAATCCTTTTCCTTTTCACCCCCTGTCTATTATTGAATAAAAGTGGC
TAGTAACAGGCATCTGAAAAAGAGAAATTGTGGAAAATTTTTTTATACTTTTGTAAGTGTATTTTTCCTG
GAGGTTTGGAAACCACAAAAGTTTTCTGTCATACTTTATTAGGGTAGCAGAATTGGTGGTAGGTTCTAAA
TTCAGCAAGTACATTTAGTAAATCCACAAAATGCCATTGCTTTCTTAAATATCATGGTTTTATTTAGTCT
GAAAATTTTTTCTCAGCATTTCATAGTTTTGCAGTGTAAATATGGCATTTAGCATCATTTTACAGGGCTC
TGGAAAATGTGGAAATTACTGTTATTCCCATTTTCAGTATTTCAAGTCCATTTGTTGTGATCAGTACTTC
ATTCCACACATAAGGTCTAATTGTGAATTTTTAAAATGTCTCTATATGTGCATGTTTTGTGGGAGTGGTA
GCTGTCTCCTGAGTCATTAATGTGAGTGCACTGAACTTCTTAAACTTCCCATTATGAAAATTTGCCTCCC
CTAAAGGGGTAAAATGAGATACCATTTGTATTCCTAGGTAGGTTTTAATTTTGTTTGGAAGTTTTGTTTT
ATTTTGTTTTTTTCATTTTATTTACATGGAGTTCTGCTTATTATAATTCTAATTGTATCAGATTGTTTCT
TAGTGATTTGCCAGTGCTCAGATGGGCCAGATCAAGACATCTATTGCCAATTAGGAACAGGATGTTTATG
GTATTTACTGATGTTCTCCGGATGACCTGTTTTATGTTTTCAGTTTGTTTTGTTTTATGATCATGTTGGC
TTTTCCATTAAACTATAACTTTAACTGAGTTGGCTTAGTTAGTAAAACATTGACCAGCTCCCCTTCTCTA
TCCTCCAGGCCCCTTCTGATGCCTCTTCCCCTATTGTGCCCCAGCCTCAGTCTGAAGGGAAGCGAATTTT
TAGGTCTCTATGTTCCAGATGTAATCTATATTTCCAAGACATAAGCTCACTGTATTTCAACCTAAATTGC
CTGAGTAATGCTCCTTGGAACATTTAGGGATAAATCCCTGTGAAAAGTAAATTTAAACAGTGACGTCTGT
AGTGGGAGGTATTTCTTAATGAATAGCCACTAGTGAGGATGTGTGGATGTCTGCACTACACGTGGCTGCC
TGATCGCTACATCTGTTTTGAAGTTCAGTGATTTCCCAGACCACATGTTCATTTCTTTAGGGGGCTGACA
TCCCTCCCAGGATCCAGTCATTGTGAGCTGGTAACTGTAACTGGCTTACTCTTTTTGACCTAGAGATTAT
TATACTTTGTCTTAGTTTGACTATTGTTCCTATCAGATCTGACAATATTGGAGTTTCTATAAATTAGCAG
CATGGCAGAGGAACCAAGTGTATTTAAACCCATAAATCATGATTTCCAGGTCTTTTAAAAGCTGTGTGGT
TTGAATAGTACTTTACTCTATGGTAGACATAAAGAGTGGTTATAAAAATTCTGGCTAATCAGGAGGCTTT
TGTAGTTCAGCTGAAACTACAAAATAACCTCAGATGCGTCACTCCTTTGGGAATCAGACCATCCAGATTT
GTCCTGGCTCTGCCAGTGAGATCTTTTACAAATTACTTACCCTCATTCCTATATATTAAAAAAAAATAAC
AAATACTATATGATTCCACTTAAATAAGGCACCTAAAGTAGTCAAGTTTATAGAAACAGAAAGTAGAACA
AGCTGGGGAGCGGGGGTGATAGGGGAGTTGTTTAATGGATGCAGAGTCTAGGTTTTGCAAGATGAAAAAT
TTCAGGAGATCTGTTGCACAACAGTGTGAATGATTAAGATGATAAATTTTCTGTTTTTTTTTTTTAACCA
ATCTTCAAAAGGATGGTATTACTGTTAACTGAATGCTTGGTATGTGTTATGCATGCATTATCTTGTTAAC
TATTCACAACTCCATGAAGGTAGATATTGTCACCGTGTTTATAGGTGAGAGAACTTAAATGGAGTTTACT
AGCTAGGAAGTGGCAGACCATGTTGGGCCTAGATGTGTCCGTAAAGCCACTTGAAAAATGTGTTGCCACC
AGCACACTTAAAGGCAGGCTCACTCTCGGGCTTTTTAGCTCTAGAATCTGTGATTCTATGATTCTGAGAC
ACGCCAGGGACTTTGCAAAGACCCATCAAGTAGGAACAAAGTTTAAATGTTTATGTGTTCAGAGACCACT
TCTCTACTATTTTTAGTGAATACAAACTGCCATATTATATGTAATCTGTGGTACATCAGCAGCACCAAAT
GCTGGTTTGTGAGAGGGTGAGATGTTACTGAAATGTGAGAAAAGTTAAGGTGTAAATAGTAATTACTTCT
TTTTTTTGTTCGTTTGTCTGTTTGTTTTCCTTGAGACGGAGTTTCACTCTTGTTGCCCAGGCTGGAGTGC
AACGGCACGATCTTGGCTCACCACCACTTCTGCCTCCCGGGTTCAAGCAATTCTCATGCCTCAGCCTCCC
GAGTAGCTGGGATTACAGGCATGTGCCACCACACCTGGGTAATTTTTGTATTGTCAGTAGAGACGGGGTT
TCTCCATGTTGGTCAGGCTGGTCTCGAACTCCCGACCTCAGGTGATCCACCCGCCTTGGCCTCCCAAAGT
GCTGGGATTACAGGTGTGAGCCACTGTACCCTGCTAATAGTAATTACTTCTATGGAATGGTTTGGTGAAG
ACTGAGAAGAACCTCACCTATTCATTATATTTTTCGACTTTTTGAGTTTGTAATAATTAGCTTGTATTAC
TTATGTTATAGGTTGAATTTGTGCCCCCAAATTCATATGTTGAAGTACTAACCCCCAATACCTCAGAATG
TGGCCTTACTTGGAAACAGGGAATTGCAGAAGCGATTAGTTAAGATGAAGTCATACTGGATTAAGGTGGA
CCCTAATCAACATGACTCTTGTCTTTATAAAGAGGGGAAATTTAGACGTAGACATGCACACAGGGAGAAT
GCTATGTGGAGATGAAGAAAGAGCTCAGCTGATGCTTCTGCAAACCAAGGAATACCAAAGACTGCCAGGA
AGCCCCAGAAGTGTAGGGAGAGGCATTTCCTCACAGCCCTCACAAGGTATCAGCCCTTAGGACACCTTGC
TGTCAGAATTCTAGTATCAAGACTGTGAGACAAATTTCTGTGGTTTAAGCCACTCAACTTGTGGTACTTT
GTCACAGCAGCTCTAGCAAACTAGTACAATTTCTAAAATAAAAAGGTTTTTATTACATACAAAAAAATGT
TAACCATGGTTACTGATAGTTTATCCAAAGCAGTGTTGAAATTAAGAAATGATCTTTATATGTGAAGATG
TTTATTGTAATATTTTTTATAATCAGAAAAAATGAGAATCCAAATATCTAGGCATTGGTGAATAACCAGG
TATAACAAATTATAGCATAACTACTTGATGAAATATTGTATGGTCATTTTGTATAGCCTTTGAAATGTGA
AAAATGCATATAACATAAATAAGCTGGATGAAAATTTTTTATACAAAATGATAACAGTTGTATGAAATAT
ATATGCATCAGACTGAAATTGGAAGGAAACACAGAAAATGAAAAAGCTTTGTTAGGATTATGGAATCATA
AGTGGGCTTTTTTCTTTTAATCTTTTAATTTGTTGCTTTTATTACATAGAATTGTGGCAATGTATTATTG
TGTTATATTATTTTTTAAAAATCAACTTTATTGAGGAACATTTTACGTGCGATCAAATGCACTCTTAAAG
TGTATAATTTGATAGTTTTGACACATGTATACCTCTTTATAACCACCGCCACAATCAAGAAACAAAACAT
GTTCATCACCCCAGAAAGTTCTCTCTTGCCCTTTTATAGTCAGTCCTTCTCCCAACTCTGGTCTCAGTTA
GCCACTGATCTGCTTTCTGTCACCATAGATGAACTTTTTCTTTTCTATAATTTCATATAAACATAATAAT
ATAGTATATACTCTGTGTCTGGCATCCTTCATTCGGCATAATGTTTCTGAGATTTATCCATGTTCTAGCT
TATATGTAGCTGATTACTTTTTATTGTTCAGAATGTTCCAATGGTATGTTGTATCCATATACCAGTTTGT
TTATCTGTTCATTTGTTGATAGCAATTTGGATTGTTTCTAGTTTTTGGCTATGAGTAAGTTGCTATGAAC
AATTTTTTTTTTTTTTTTTTTTTTTTTGAGATGGGGCCTTGCTCTGCTGCTCAGGCTGGACTTAAACATC
TGGGCTCAAGTAATGCTCTCACCTCAGCCTCCCAGGTAGCTGGGACTATAGACATGTGCTCCTAGGCCCA
GTTTGAACATTTTTTGTAAAAGTTTTATATAGTCATACATTTTCATTTCCCTTGGATAAATGCCTAGGAT
TGGAATTGCTGGATTGTGTGATAGTATGTGTTTAATATTATAAGAAACTGCCAAATGGTTTACATTCTCA
CCACCAACCTATGAGAGTTCCAGTAGCTGTACATGTTCACCAACACCTCACATTATCAGTCTGTTTTTAT
CTTAGTCGTCCTCATGGATGTATAGCAGTCTCTCAAAGTGGTTTTGGTATGAATTTCCCTGATGATTTGA
CACTGATCATCTTTTCATGTGATTCTATCTTCTTTTGTGAAGTGTCTATTAAAATATTTTGCCCATTAAA
AAATATTTATCTTCTTCTTAAGGTGTGTAAGACTACCCTTTATATTCCAGATACTGTTCCTTTGTCAAAG
ATATGTATTCAGAGAACATATCCACTCAGTTGTGGCTTGCCTTTTCATTTTCTTAATTGTATACTCAAAA
GTGCATATGTTTTAAATTTTTACTTTAAATTTAAAAATTTTCCTGATTTGTCATTTTGTTCTGTTATAAT
TCATGCATTTTTTTCTATTATAATTCATGCTTTTTATACCTAAAAAATTTTTGCCTATGTCAAGTTTATG
AAGATTTTCTCCTGTGTTTTCTTCCAAAAGTTTTATGTGTTACTTTTTACATTTAGATATGTGATCTATT
TTAAGTTAACTTTTCTAGACAGTTATGAGGTGGGAGTAGAGGGTCTAGATTTCCATTTGTTCTCTGTTTT
CTTGTTTTAGCTCGTTGAACATAATTTCAGACAGATTTTGTGTGTGGCTTTTTGTTTTTGTTTTTGTTTT
TTTCAGATGCTCTGTCGCCAGGCTGGAGTGCAGTGGCGCAATCTCAGCTCCCGGGTTCAAGCGATTCCCC
TGCCTCAGCCTTCCGGAGTAGCTGGGACTACAGGTGCATGCCACCATGCCTGGCTAATTTTTTGTATTTT
TTAGTAGAAACGGGATTTCACCATGTTGGCCAGGGTGGTCTCGATCTCTTGACCTCGTGATCTGCCCGCC
TCAGCCTCCCAAAGTGCTGGGATTACAGGAATGAGCCACCACGCCCGGCCCAGACAGTTTTTTAAAAGTC
TTTGTCTAGTAAGTTCAAACCTGTATTTCTTTTATTTATTTATTTATTTATTATTATTTTTTATTATGCC
TTAAGTTCTAGGGTACATGTGCACAGCGTGCAGGTTTGTTACATATGTATACATGTGCCATGTTGGTGTG
CTGCACCCATTAACTCGTCATTTACATTAGGTATTTCTCCTAATGCTATCCCTCCCCTCTCCCCCTACCC
CATGACAGGCCCCGGTGTGTGATGTTCCCCACCCTGTGTCCAAGTGTTCTCATTGTTCAATTCCCACCTA
TGAGTGAGAACATGCGATGTTTGGTTTTCTGTCCTTGTGGTAGCTTGCTCAGAATGATGGTTTCCAGCTT
CATCCATGTCCCTACAAAGGACATGAACACATCCTTTTGTATGGCTGCATAGTATTCCATGCTGTATATG
TGCCACATTTTCTTAATCCAGTCTATCATTGTTGGACATTTGGGTTGGTTCCAAGTCTTTGCTATTGTGA
ATAGTGCTGCGGTAAACATACGTGTGCATGTGTCTTTATAACAGCATGATTTATAATCCTTTGGGTGTAT
ACCCAGTAATGGGATGGCTAGGTCAAATGGTATTTCTAGTTCTAGATCCTTGAGGAATTGCCATACTATC
TTCCACAATGGTTGAACTTGTTTATACTCCCACCAACAGTGTAAAAGTGTTCCTATTTCTCCACATCCTC
TCCAGCACCTGTTGTTTCCTGACTTTTTAATGATTGCCATTCTAACTGGTGTGAGATGGTATCTCATTGT
GGTTTTGATTTGCATTTCTCTGATGACCAGTGATGACGAGCATTTTTTCCTGTGTCTGTTGGCTGCATAA
ATGTGTTCTTTTGAGAAGTGTCTATTCATATCCTTTGCCCACTTTTTGATGGGGTTGTTTGATTTTTTTC
TTGTAAATTTGTTTAAGTTCTTTGTAGATTCTGGATATTAGCCCTTTGTCAGATGGCTAGATTGCAAAAA
TTTTCTCCCATTCTGTAGGTTGCCTGTTCACTCTGATGGTAGTTTCTTTTGCTTGTGCACAAGCTCTTTA
GTTTAATTAGATCCCATTTGTCTATTTTGGCTTTTGTTGCCATTGCTTTTGGTGTTTTAGTCATGAAGTC
CTTGTCCATGCCTAGATCCTGAATGGTACGCCTAGGTTTTCTTCTAGGGTTTTTATGGTTTTAGGTCTAA
CATTTAAGCTTTTAATACATCTTGAATTAATTTTTGTATAAGGTGTAAGGGAGGAATCCAGTTTCAGCTT
TCTACATATGGCTAGCCAGTTTTCCCAGCACCATTTATTGAATAGGGAATCCTTTCCCCATTTCTTGTTT
TTGTCAGGTCAAACCTGTATTTCTTTAGGGTTGTTTCTAGAAATTTATATCGTTCCTTTGAAGGGGCCAT
GTTTCCCTGTGTCTTTGTGTGTCTTGTGATATTTTGTTGACAACTGGTGATTTGAAAAAAAACAGCCAAT
TCTCTCAATTTTTGCAGACTGGCTCCATGTGGGGAAAGACCTTCAGTAGTTAGCCCAGTGTAAAGGCCTA
AGGTCTTACACTTTTTTGGCATATACATCTTCCTTGGATTTGTCTGTCTGGTTTTTTGTTTTTTTCCAAT
TCCGCTGTATACATGGCTGCTGTTACATGTATTAATTTCTCTAAGAGCCTTACTCCTGCTGCTTCACAGA
GACTCAGCTGTTCTGCTGTTTTTCTCTGCCCATAATCTCTTGCCCACAGGTGACTGCAGTTTCCTGCAGT
TTTCATGCACTACAGAACTTGCCACTACCTTCTGCAGCCTTCAACCTGAGATCCAAAGTGTCCCAGCATT
CCCATCCGAACTCTGAGTCAGGCAATGAAGAACCAGTCCCTTGGGCAGCCCGCAGACATACTTTTCTCTG
TAATGAGGGAGAAAACTAGGAATTGGGTCTCTTTGTCTCTCCCATGCTATGCCAGGGAAAGGCTAGGGCA
AGTGCAAGCAAGCACAGCATGACATTTCCTATCGTTTTCAGTGTGGCTTTTTCTTGATTGGGTGTTTGCT
TGGTTGCTGCATATCCTTGACCTGTTTCCACAGCTTCCACAAAACCATTTTAATCAGCATGTAGTTGTTT
GTTTGATGTTTCCATGGATGAACGGAGAGGGCCATCCTAGTCTGCCATCTAGCTAACATCACCCTATCAA
ATGCTGACTATTTTTAAATGTTTTTTCTGCATCTATTGAGATGATCATATAGTTTTTCTTCTTTATACTA
TTCTAGTATGGAGAATGCAGTCACTGATTTTTAATGTTAAACCTACTTTTCATTACTGGGATGGTCCCCA
TTTAGTCATGTAATGTTATCTTTTTAATATATTGCTGCTATATGCTAAAATGTTAAGGGTTTTTATGTCT
ATGTTCATGAGAAATATTGATCTGTTGTTTTCTTACAGTGTCTTTGTTTCGACATCAGGGTAATTCACTC
TTATTATTATTTTTTTGAGACAGGGTCTCCTTCTGTTGCGCAGGCTGGAGTGCAGTGGCCAATCATAGCT
CACTGCAGCCTTGACCTCCTGGGCTCAAGCAGTCCTCCCACCTCAGCCTACTGTGTAGCTAGGACTACAG
GCATGTACCTCTGCAGCTGGCTAATTTTGAAATTTTTTATGGCAACGAGGTTTTCCTGTGTTGCCCAGGC
TAGTCTCGAACTCCTAGTCTCAAGCGATTCTCCCACCTTAGCCTCCCAAAGTGCTAGGATAACAGGCATG
GGCCACCACACTCGGCCTGCCCTTATTTTTCTTCCTTAAATGTTTAATTGAAGTCACTAGTGAAACTTTA
TGGTCCTCAGATTTTCTTTGGGGGAAGTTTTTAAATTGCAGGTTCCTTATTTTTAAAATAGGTAGTTTCT
ATTCAGGTTCTCTGTTTCTTCTTGAGTCGGTTTTAATAATTTTTGTCATTTAAAGAATTACCTATTCCAT
CTTTGTTGTCAAGTTTATTGATATAACATCCTTTAATAATGCTTTTAGTATCTGTAGGATATGTAATGAT
GTCTTCTCTTTTATTTCTGACATTGGAATTTGTGTCTTCTCCCTTTTTTCTCCCCCATGAACTGAGCAAC
GGTTTAACAAATTAAATTTTTTTAAATAGCCAGGTTTTGGGTTTATTGATTTTATCTATTGTTTGTGATG
TCTTTGATTTTTGCTCTTTATGATTTTCTTTCTTCTACTTACTTTATATTTAATTTGATCTTTCTTACCC
TAGCTCTTAAGCTGGTGACAAATACTTGCTCAGAGACCTTTCTTTATTTACACCATGAGACTTAAAGCTA
TAAATTTCCCTCAGTCGCTGCTTTATGTGCATCCACTGAATTTTGATACATTGTGTTTTTATTTAAATTT
AGTTAAAAAAAATTTACTAATTTTCCTTGTGATTTCTTTTTTTGACCATTGGTTATTTAGAAATGTGTTT
TTTGTTTGTTTTTTTTTTGAGATGGAGTCTCACCGTCACCCAGGCTGGAGTGCAGTGGCACAATCTGGCT
CACTGCAACCTCTGCCTCCTGGGTTCATGCCATTCTCCTGCCTCAGCCTCCCGAGTAGCTGGGACCACAG
GCGCCCACCACCACACCCGGCTAATGTTTTGTATTTTTGGTAGAGATGGTGTTTCACCATGTTACGCAGG
ATGGTCTCGATCTCCTGACCTCATGATCCACCCACCTCGGCCTCCCAAAGTGCTGGGATTACAGGTGTGA
GCCCCCAGGCCCGGCCTAGAAATGTGTTTTTAAATTAACAAATATTTGAGGCTTTTCCACATATCTTTCT
GTTACTGATGTATAATTTAATTTTGTTGTGTCTGATTATATATTTGTATTATTTCAGTCTTCTCAAATTC
ACTGAGAATTGTTTTATGGTTCTGAATTTGGTTTGTTTCAGTAATTGTTCCATGTAAACTTCAAAATAAT
GTTGGGTGGAATATTTTCTAAATGTCAGTTGGGTTAAGATGGTTGATAATTATCGAAGACTGTGGCCGGT
CTGAGATTTTTTTTTCCTTCCTTTTTGGAAGGTAACAAGTTAGACTGCCACTGTTTCATGCATGCTGGCT
GAAGACATAGGACTTCTGGGTCAGAGACAAAGGATTTTATAATCACAGCACAGCAAGCCACAAGAGTTTG
GTGTTTGTATCTGCTCCTCTGGTCCCAGAAGACCTATGGGAGAGATGCAGAGAGTCCTAGATAAATACTG
TGCACATGTGGGTTTGTGTCACAGCTGAGGAACCTACAGCTTGTATTGCTCAAATCTTTTATAATAGGCT
GCAAACAAACTTCCTTTTTCGTGGAGGAAGACATTATTCTTATTGTTGGACAGTTAGCAAACCTGTCCCA
TTTCTTCTGAATGAGACCCTGTCTCTTTTCCAAAGGGGTTGGCTGTACAAATATCATTGAAAATATAGTC
TGGAGCAAAAGCAGAAATGCAGCAGACCCATGGAGAATTGTCTACCAATAATAGTGTTGTTCAGGTCCCT
ATAGTCTTCTGATTTTCTGTCTATTTTTATCAATCTCCTAAGAGATGATGTTGAAGCCTCCAATTATGAG
TTATTAATTGCTATTTTCAATTCTGTCATTTTTTGTTTCATTTATTTCTAAGCTCTGTAACTGTGTATAA
ACACATTTAGAATTGTTACATCTTCTTGATGAATTGACCCTTTTATCATTGTGAAATCTTTCTTTTTTCC
TGGTAATACTTTTTGTTTTTAAGTCTGCTTTGTCTGACATTAAAACAACAGTAACAACAATAACAGTTTT
CTTTTGATTACTGTTTGCATGGTACATCCTTTTACTTTTAACTTACTTGTGTCTTTAAAGTGGGTTTTTC
ATAGGTAGCGTATAGTTTTTGGTTTTATCTAATGTGACACCTGCTGCTTTTTCATCTAATATTTAAAACA
TTTCTATGTAATATAATTATTGATATGGCTGGTTTAAATCTTTAATAATAGTTGCTGTTGTTAAGTAACA
AGCCATTCCAAAGTTAGTGAATAAAATAATAATCCTTTTAATGCCTTTTTAGATTCTGGGTTAGGAACTC
CACTACACAATGTAATTGGCCTCCACTGGGAAGACTTGAATGCTGGCAGGATTCAGCATCTGGGGCTGGA
GTCACCTCCGTGCTTACTCCCTAGTTTTCCTGACGTTAGTTGATACCGACTGTCAGCTGGTTCCTCAAAT
GAGGCTGTCATCTGGAACCCATGGCCTCTACGTGGGGCTTCTTGGCTTCCTAACAGCATAATGGCTGGGT
TTCATGAGAGTGTCCCCAAGAGAACCAGGCAGAAGCTACATAGCCTTTTGTAACCTATCCTCAGAAATCA
CAGAGTTATACTGTACTCTCTTAGCAGGAGCAGTCATACTACCCCACTCAGATTCAAGGGAAGGGATCTG
AAACCCCACCTTTCGGGGGGAGGAGTATCAAAGATCTTTAACACCAGACTTCAAAACTGCCACATCAAGC
ACCTTGCTATTTGTTTTCTATTTTTGTCATCTGTTCTTTGTTCTTTCCTCCTCTTTCCCATCCTCCTCAC
TCTCTCTCCCTATCTCCCTCTCTCCATCTCCCTCTCCTCCTCTCCTACCACCTTCTTCCCTCACTTTCTT
GTTTCTCCTTACCTCTTCAGAGACCGTATAAACTGCTCTCTGCTCCCCTAAGAGAGGCTCTTGTTTTTAG
GAATTTAATTCTTTTACATTTCTTTGCATCCTCAGATGCAAAGTGGTTTACCCATTTTATCTAGTTATTA
CTGCAGAAGCAGTGATCTGTATCCGAACTGTAAGAGATATCTTTGTCTTTGAACTGGTAAGTTTACACCA
TTTAATTTTTTAAAATTACTGCTAGTTTGGAACTCTTTTTTATAACTAAATTTATTACTTCAATTTGACC
TATTTTTAATGTTTCTTTTAAACTTTTTATCATATATTTTTGTGGTAAAATGCATATAAAATTTATTATC
TTAACCATTTTTAAGTATATAGTTCAGTGGTATTAAGTACATTCATATTGTTATGCAGCTATTACTACCA
TCCATCCTCAGAACTCTTTTCATATTGTGAAACAGTACCCATTCAACAGTAATTCTCCATTTCCTCTGCC
CCGGCACCACCATTCTACATTCTCTCTCTGTGATTTTTGACTACTCTAAGTACCTCATATAAGCGGAGTC
ATACGTTTGTCTTTCTGTGTCTGACTTACTCCACTAAGCATAATGCCATCAAGGTTCATCCATGTTCTAA
CGTAAGTCAGAATTTCCTTCCTTTTTAGGACTGAGTAAAATTCCATTGCATGAAGAGACTGCATTTTGCT
TATCCATTCGTCTGTCAGTGGACACTTGGGTTGCCTCTACAGTTTAGTTGTTTGTGGATAATGCTGGTGG
GAACATGGGTGTACAAATATCTCTTCAGGATCCTGCTTTCAGTTCTTTTAAGTATAAACCCAGAAGTGGA
ATTGCTGGATCATCTGGTAATTCTATTTTTAATTTTTTATATATTATTATTATTTTTAGAGACAAGGTCT
TGCTGTGTTTCCCAGGCTAGAGTGCAGTAATGTGATCATGGCTCACTGTAGTCTCAAACTCCTGGGCTCA
ACCGATCTTCCAACCCCAGCCTCTTCAGTAGCTGGGACTACAGGCATGCACCATCATGCTCAGCTAATTT
TCCAAATATGTTTTTTGTAGAAATAGAGTCTTGCTTTGTTCCCCAGGCTGTTCTCAACTCATGGCTTTAA
GCAGTCCTCCTGCCTCGGCCTCCCACAGTGCTGGGGTTACCAGTGTGAGCCACCACACCTGGCCCATTTT
CTGTTTTTTTCATAGTAGCTATCTTAATGGGTGTAACATAGTATCACATTGTAATAGTTTTGAGTTGCAT
TTTTCTAATGATTAATGGTGTTGAACATCTTTTCATGTGCTTGTTAGCTATTTGTATGTCATGTTTGGAG
AAATGCCTGTTCAGTCCATCTGTTTTTCAGTTGTGTTGTTTGGTTTTTATTGTTGAGTTTTAGTTCTTTA
TACATTCCAGGTATTAATCCCTTATCCTGGTATATGATTTGCAAATATTTTCTCCCATTCTGTGGGTTGC
CTATTTACTGTATCTGTAGTGTCTTTTGAAAGTTTTAAATTTCGACTATTTGATTTGCCTGTTTTTTTCT
TTTGTTGTCCGTGCCTTTGGTGTCACATCCAAGAAATCATTGCCAAATCTGTTGTCATAAAGCTTTGCCC
TATCTTTTCTTCTAAGAATTTTATAGTTTTAGGTCTTAAATGTAAGCCATGGATGCATTTTGAGTTAATA
TTTGTATATGGGGCTAGGTAAGGGTACACAGTTGCATTATTTTCCATATGGATAGTCAGAATTTCCCACC
ATCATTTGTTGCAAAGGCTGTCTTTTCCCCATTGAATGATCTTGGCACCCTTGTTGAAAATCATTCAACC
AGATATGCAGGGATTTATTATTGGACTCTGTATTCTATTCTACTGATCTGTATGTCTGTCTTTCTGCCTG
GACCACACTGTTTTTTATTACTGTAGCTTTTTAGTAAGTTTTGAAATCAGGAAGTGTGAGCCTTCTAGCT
TAGTTCTTCTTAGGGACTGTTTTGGCTATTCTAACTCTTTTGATTGATGGTTTTTACTGTTTCCTTTCAT
CTCTACTTTTTGCTTATTAGGCATATCTTTTTATCTCTTACTGGCTGCTCTAGGGCAGCAGTGTCCTATA
GAAATATAATGTGAGCCACAATTGTGACCCCCATATTTCCCATTAGCAACATTGAAAAACTCAAAAGAAA
GAAATGAAATTAATTATAAAAATATTTTATTTAACCCAGTATAATGAAAATATCATTGCAACATGTAGTC
GAAATAAACAGAATGAGATACTTTGTTCTCCTTCTCATACTAAATCTTTGAAATTCAGTGTGTAACTTGT
AGCTTATCTCAGTTCAGACAAGCCACATTTGAAGCTTTCATTTGCCCATGTGGTCAGTGGCTACTGTGTT
GGGAAGCACAGCTCTAGGATTTATAATATTCATATTTTGCATAATACATGACTACAAATATTACTTGAAA
ATAGAGTGCATAACATATGTGTATACTATTAGAACCTCATCACAGTCTACAGCCACATCTCCTCTCCCTT
CTGTTTATCGTGGTGGTACATTTACTTCTAAACATTTTATAAACCCACAGTATATTATTAGTTTTAAACA
AAATTACTGTTTTAAGAACATTGACAAGTAAGGAAAAAATCTTTTCTGTTTACCCACAGATTCTCCCTTT
TCAGCACTCTCCCTTTCTTCCTGCAGATACACATTTCCATGTGATGTCACTTTCCTTCCTCTTGAGTTTC
TCTTACCATTGCTTGGAGTGCATGTCTGCTGCTGACAAATTTTCTCAGCTTTGGTTTCTCGGAAAGAGGC
CTTATTTCACCTTCATTTTTGCATGATAGATTTCTAATTCGACAGGTTTTTTTCTTTGCTATTTGGTACT
TTAAAGAGGTAATTCCATTCACCTCTGTCTTGCATAGTTTCTGAGAAGGCTGTTGTCATTTTTATCTTTG
TTCATCTGTATCTTTTTCTACTTAGGCTGCTTTTAAGAATTTTTTCTTTATCATAGATTTTCAGAAGATT
GATTATGATGTATCATGGTATGGTTTTCTTTGTGTTCATCCTAGCTGGAGTCTTTCGAGATTCCTCTATT
TGTGCATTTATAGTTTTCATCAGATTTGGAAAAAATTTAGTTATCATTCCTTTAAGTGCTTATTCTGTCC
TGTACCCCCTTTCCTAGGACTTGAATTCTATCAGTGTTAACCTACGTGAGATTTTCCCAAAGATCATTGA
GGTTCTTGTCATAATTTTCCCCATCTGTTTTCTCTCTCTGCTTCCTTTTGGATAGTTTTATTGCTATGTC
TTTAAGTTTCTAAAGATTTTTCTTTTAAAAAAAGGTTTAAAGAAAGAATGACTTTAAATCTTTAAGTCTT
TCTCCTGAAGTATTTAGTCTGCTTAATTTTGCTTTGTGTATTTTTTATTTCATATATTGTATTCTATATC
TGTAGAAGTTGTGACTGGTTCTGGTTTTTTTTTTTTTTCTTACCATTCATTTCTCTCCTGATTATGTTTT
TCTTTAAATACCTATAATACGTGTAATTGTTTAAGGTCTTTACTACTTCCATCATCTCTGCCATTTCCAG
CCTGCTTCCTTAAGCTGCTTTTCTTTTTGGTTATGGGTCATATTTTACTGCTTCTGAGCATACCTAGTAA
CTTTTTATTAGATGCCAGGTATTATGAACATTGCATTGATGAATGTGTTGATTATGTTGTCTTCTTTTAG
AGAGAGTGTTGTTTTATCCCGGCAGACATTTATGTTTTGTAGATTAGGTCTATCCTTTCCAAGCTTGTTT
GTAAACGTTGTTGGGGCAGGTCTATAGTGGCCTTTCTCCAGGGCTAATTTTATCTGCCCTTTCATATGCA
CAGATAATTAATTTTACCAAGGCCAAGTAGCATGTTAAGGTCAAGTAGCATAACAAGGTCAAGTAGTACC
CTACATATGCACAGATTATTATTCAGCCAAAAACTCAGAGCCCCCATGTTGATTTCTGGAGCCTTTTCTC
TATCTAGTTTCCTCTTGGCTCTCAAATTGTAGCTATCTTTGCCTTATCAGACTCCAGTGTTGGTCTCCTT
AACTCAGTGAAACTTCTGTGCTCTGCTCACGATGGCTCTCCAGCCCTGATTCAGAAAGTGCACCCAGGCA
GAAAGCCAGGCCAATCATAGGGATTCCCTCATTGGTTTTTCTGCTTTCAGGATCACAGTCTGGTGCTGCC
TGTTGTCAAGTGTCTGAAGATATTTTGTTCAGTTTTCTAGTTTTCTGTAGCAGGAGGATACATATAATAG
CTTGCTAGGGTTAGAAGTCCTGAAGACAACTGGAGTGCTTTAAAATCCTTTGAAAAAATTGGTAAGCCTT
CAAGAAATTTTTAAGTAGTGTTAGAGGTTAGTATATATATTAATATGCTACTTGACCTTGGTAAAATTAA
CATTTTTCAGGTTACAAAGATCTATTGTAACCTGTCCTATTAGTATATAGATAGAGTTTATGGAATATAT
ATGACATGTTTTCAGAGTCTCCATTCTGTAATAATTGCCATTTGTTAAGATTGTTAAGTTGAAACAAATT
GTTGGGCATCTAGATCAGATTTAAAAGGAGTTAAACCAAATTGAGACTGAATTTTGGAATGGCTATGCCA
AGTACTCTGCAACACAGCTAATTGCCTGGGTTCAAATCCTGGTGTGTCACTTACTACTTATTACCCTGGG
CAAGTCATATAACTTTTCGAAATTACAGTTTTCTATCTGTAGTGACAAAATAACTTTACCACCTCGTAGG
ATTGTTGGATTAAGTGATTATATATAGTGTGTATGTGTATGTGTGTGTGTAAAGCTTTTAGAACAATGCC
TGATGTTATGTGCTCAAAAAATGTTAATTATTGTCATTGTGATTGTCATTGTTAGGGAACTGAGTTTCTG
ATTAAGGTTTATTAAGCCTGAATTTTTTTTTTACCATTTTAATTGAGACTTCTCTTGCTTTTTTAACCAA
GTATATCATTTTATAATTTAAAAAATAATAAATAACACATATCTATCATCCAGTGTTAGGAATAGAATGT
TACTGATATGTTCAATATCATCCACATAACTGTCCCTGCTCACATATCCTATTCTCTCTTCCTATCTTGA
ATTTTCTATTTATTGTCACCTTGCTTTCTTAAAAATAGTTTTGCTATGTATTGATTTAGTCATAAATAAT
ATATATTAATTTTTCCTGTTTCTAAAATTTTATATAGATATAATGACATGTATTCTTCTGCCACCTGCTT
GTTTGCTTGATGGTGTATTTTTTTGAGATTTGTTCATGTTGGTGCATGTAGTCGTGTGCATTCATTTGTA
CCAGGGTAGAGTGTGTTTATTTCCAGGTTTTGCTGTTACAAACAGTAGAGCTCTGAATATTTCTGTGCAT
ATTTCCTGGTATACATGTGCAAGAGTTTCTCTGGGTATATGTCTGGATGCAGATATTTCAGGTTACAATC
TTTAGCAGGCTGCTCGCTGGAGCAGGCCAGAGTGGAAGTAGGTTATTGCAGTAGGCCAGGCAAGGGGTTA
TGAGGGCTTGAACCAGAGTGATTACCTTGGAATGGAGGGAAGCAGATGAATTGGAGATTTTGTCTGGAAA
TATAATCAATAGATATTGATGGTGTATTTTATAAAGGGGGCCGGATGAGAAAGAACATCAAGGAGACTCC
CAGGATTTTACATCAAGTTGCCATTTACTGAAATGAGAACTGCTCCCAACAGATAGACATATTTTATTTT
GTTTTAATTCATACATGGGCTTTTAAAAAGAATAAACTTTATTTTTTAAAGCAGTTTTAGGTTTGCAGCA
AAATTGAGTGGAAGGTACAGGTATTTCCCATATCTACCCATTCCTACACATGCACAGCCTCCCCTGTTAT
CAACAGTCCCCTCCAGAGGGATGCATTGGTCACAACTGATGAACCTGTCCTGACACATCGTTATCATTCA
GAGTCTGTAGTTGACATTAGGGCTCACTCTGGGTAGTGTACATTCTATGGGTTTGGGCAAATGTGCAATG
ACACATATCCACCATTACAGTATCATACAGCGTAGTTTCACTGCCCTAGAAATTATTCGTGCTCTCCCTG
TTCATTCCCCTCTTCTCCCTAATCCCTAGCAGCCAGTGATCTTTTTACTGTATCCACATTTTTTCCTTCC
CCAGAATGTCCTGTAGTTGGAATCATAGATTATCTAGCCATTTCAGATTGGCTTCTTTCATTTAGTAATA
TCATTTAGTAGCTCATTTTTAAAGTGCAAAATAACATTCCATTGTCTGGATATATTACAGCTTATCCATT
CACCTACCGAAGGTCATCTTGGTTGCTTTCAAGTTTTGGAATTATGAGTAAAACATCTGTGTTTACTAAA
ACACAGATGCTAAAAACATCTGTGTGCAGGTGTTTGTGGGGACACAAGTTTTCAACTCTTTTGGGTAAAT
ATCAAGGAGTATGATAGGTGGAGAATATGGTAAGGGTATGCTTAGTTTTATAAGAAACTGCCAAAATGTC
TTCCAAAGTGGCTGCACCATTTTTCATCCCCATCAGCAGCGGATGAGAGTTCCTGTTGTTATACATCCTT
ATCAGCATTTGGTGTTAGCAGGGTTCTGGATTTGGGCCATTTTAATAGGTGTATAGTGGTATCTCGTTGT
TTTAATTTGCATTTCCCTGAGGACATATAATGTGCAGCATCTTTTTGTATGCTATTTTTCATTTGTATAT
CTTCTTTGACGAGGTGTCCATTACAGTCTTTGGTGCATTTTTTAATCAAGTAGTTTTCTTCTAGTTAAGT
TTTAACAGTTCTTTATATGAATATGTCTTTTTAAAATATTTTCTCCTACTCTGTGGCTTTTCTTTTAATT
CTCTTGATAGTATCCTTTGCAATGGCATAGTAGGAGATAATATGGGTGACTTTTCTGTTAAAAGGTTTAT
GGAGGCCGGGCGCAGTGGCTCATGCCTGTAATCCCAGCACTTTGGGAGACCGAGGTAGGCGGATCACCTG
AGGTCAGGAGTTCAAGACCAGCCTGACCAACATGGAGAAACCCCATCTCTACTAAAAATACAAAATTAGC
CAGGTGTGGTGGTGCATGCCTGTGATCCCAGCTACTCAGGAGACTGAGGCAGGAGAATCGCTTGAACTCG
GGAGGCAGTGGTTGCCGTGAGCCGAGATTGCACCATTGCACTCCAGCCTGGGCAACTAGAGAAAAACTCC
ATCACAAAAAAAAAAAAAAAAAAAAAAAAAAAAAAAAAAAAAGGCTTCTGGATTAGCAGAAGGCATTTAC
AGAGTTTAATACTTTCCTGTCCCTTACCTCTTACCTGCAAAGTTTATTAGAAGATGGATTTTTAACATCT
AGGCTGAAATACTACAGTTAGAGCCATTTGTGTCACACTCCTGAATGTAGTCTAGTCTGTATTATTAAAA
TTTTAAAATAAACACCGAAAAGACAGACACACACGTACACACACACTCACCCTTCATTCCTCTTCCTTAG
GATGAAGTAAAATTTGTTAAGTTATATTAAGCCTCTAAACAAACTGCTTTATGGCTCCAGCAGCTTTGTG
TTGTTTCTTATCTTTGTAACATTTTGCCACAGGTACAGTATATAATGAAATAGGTGGGGGTGGCTAGTGG
AGAGGTTGTAACACTGTCAATGAGAAGGCACCCGGGATTTGTCCGTCTGACCTGCTCAGTCAGAGTAGTG
GAGCCACCCGGAGTTCTAGGGAGCATCAGTCTAGGAGGGAGATGGGCAATGTTGCATCTCCTGGAGGCCA
GCACAGTTCAAAGTTGGTTTTCTGAGTCTCGGTCTTGTGGTTTTAGGATTTTATGGCTTTTGGTGGGTAT
GTTTGGGAAGGAAGAGCCTTCATTCCTTGCTTAACCTGTGCAAATAATCTTCAAGGACTTTGATCACTGG
GCAGAGGGATAGGAGACTGCCATCTGTCCTCCAGATGAAAGGTTTCTTCTTGGCAGGAGCACTACAGAGA
TGGAAGTTGTGATTTTTTGGTTGTTTTGACTTTATGCTTCTAGAAAGGATCTTTTAAAAAATTCTTATAG
CTCTTTTGTTTTCTTTTCTTCTTTATGGTTTCTTTCCTTTTTAGTGATAGAAGCTGTGGCCAGCTCTTCA
TGTGAGTTCACCCACTTGCCCCTCCCAAGGCAGGCACCCTGATATAGACCAGTTTAGGTGGAGGTTTAGG
GTCTTCCTTGCTCACCTTTGAGCCAGGCTGGGCTGCCAATTTCTGGCTGAGCTGACTTGACCTTTAAAAA
AAACAAACTTGATATTATCTTGGCTCCTACAGAGAAGACATGCAGTGTGGGGCTGGGGGCTGGGGGTGGA
GCAGGGTTTGGTTGTACTCCCATTCATTAGTTCACCTCTTTTTCTGAGTTCCTATGCTGGGTATCCTGAC
TGACCCTTATACACTGTACCTGGGATAATGCTCCTGGAAAAGCATGTCTTTGCAACCCCATTACTGTCAT
CATGAACAAAATTAGAATGGAAAGCAAATTTTTGTTACAAAAAAAAGTTTAGGGGTAAACAGACCTGCAG
ATTTTTACAACTGCTATGTTTCTTGGTATTCTTCTGTGTGTTTAATCACTGGACAGATGTAAGGGTGAAT
TTTATTGTTCCCTTGGTGCATGTTTAACCTGTATCTTAGCTATCTGTTAAGGGGTTTAACTTGGGCTGTA
TATCTTCTTTAAGAGCTTGAAAGGGAATTTAGAGTGGCATATCTATTTTCATTGCAGCGTTAGATGTACG
GTAAGTTAAGCCATTTTTGTGAAAATTGAAAGCGTAATGTTAAAAGTGTCCAGTTTTTTAGCCATTTGTG
CACATTAAAAATAACTTGCTATTTATGTTCAGTGGTTTCCTTGTTAGACGATGTAGGGGACTTGCCACAA
CACATGCAACAGATTATAAAAAGACTGCAAATTTAATAATTACAACATGGCACAGACCGCGCTGGCAGAT
ACCGAGATCCAGCACACTCTTTAATCATCATGCTTCCCATAGTGTGGGTGGTCATGGTCCGCAGACATTT
CAGGCAGGCCAGTCCCGTTGCAAGAGCACAAGTAAACAGCATTCCACAGGCTTTTCAGGATTTTTAATTT
GAAAAAGTATAGCATTTCTTTTAGGTTGCTTTTCCTTTCTCCTTCCTCCTTCTCCCGCCTCCTCCTCTAA
ATTTTCGTTGTTTAGAATGTTTGCTTTTTCAGCAAAACCTTTTTACATATGATGCTTTTGTGTATTTCTT
TTTCCAGCTTTTATTTGGGGCAACAAAATAAAACATTTCTTAATACTCCTGAAGCCTGTTTCAGCACAAA
AGCTGAAAATGACCGGTAGGATATTTTGCTCTTTGGAGAAGTTAGCAACTTTTCATTATAAGTCCTGGTA
AATTGAATTTAATCAATTTATTTCCTTACTATTTTTTTAAAATTTAACTTTTACCGCTTGTTTCCTTTGA
TGTTTGTTTGATTAAATGAAAATTTGAGTCATCTGCAAAGTTTTTCTTCCTCATTCAAAAATGTTGTTCT
TGCTAGCCTGTTTTGTTCTTCTACTTTCCATTTTTTTGAAGCTTTTATGATCTTAGTCTTTAATGTTAAT
GAATATTGATAAAAGAAGCAAGTCACTAGTTTTTGTTGATTAATGAGAATTATGGAGTTTAGTAAAGCTC
TTGGTTAGTTTCTCTCGGGAGGAGTTATTTTAAGTAATAAATGTGTACAAATGGAAATGTATCATTCCGA
AGCTTTAACATTTTCTCTGAAAGTGTTTTTTTTTTTTAAAGAAAAACTTGGAAAAACACAGATATTTTAA
TAAAGAACAGTTAATATTACAGATGCGCACCTTTCTCTTCTTTCCTTCCCTAGGGATTTCCTTAAGGGAT
GCTGTCTTGTTGCTTTAAATTATAGACACTGTTCCTAGTCTTCATATATATAATTAAAGACAGTTGTCAA
GTTTTTTAAAATATAAAATATGACATCTTAGCTGCTATTTTATATAGGCACACATAATTGAGTAAAAGAA
CTATGTAAAAAAATACTTTAAATGTATATATCATAAGATACAGTCCTTACTAAAGTCATAGTATACTATA
CCTTTTTTTACATAAGCTGATTAAAAATGAATTGCTAACAATTAGAATTTATAATGACATTGTCAAAACC
AGCTTAAAGAGAAAGTGGTGTGATTATACATTTTAGAAGGAATAACTTCCTTTTACAATCATACCTGTAT
AGAATGCAGTGCTATACATAATTTTTGGAGTTTTGTTATTGTTCATGAAAGCATTTTAAAAATGCTTTAG
TCATTTTCATTTGTGATAAAGCTAATCTAATTCTCTATTCTGATGCTTCTTGCCAAGCTTTAGATCATAA
CAGCTTAATTTAAGACAAAAATTGCTGGCTAATCCCCTTTGGTATTTTGAAGCTATTTTGGGCTCCCTTT
GTTCTATGGTACGTTCCATTCTGTTTATGGGGAGCCATCGGGTGTTTGATGTGGGACCCTGTGGCAGAGG
AGATTGGAACTCCAGAGTCTGGGTGCAACTGGGACAAGTTAAGGATGCTGAATTTAACTTGCTCTTGGAT
TTGTGTTTCTTCTATATAAATTGAAGGATTACATTTAATTTTAGATGGAGTAGGGGTAAGGCAGATTGGG
TTTGATTTTCGAAGTCAACATTTGGAGTTTGGTAACCATATCAAAAGCGAGGATTTTGACAGATTTAATT
TTCATATTACTGGTTAACATATACTTATGACTAAGTGTTTAGTCTCCCCTTTCCTGAGCTTCCTGATGGG
TGTCAGATTTGCATTAAGACACCAAGGCCAACCCGCCTACACACAAAAATTGTGTTTTGAAAGTTCTTAA
TCCCTCATTTCAGACTCATGTTGTGGTTCCCACCAAGTGGGCTGCCTGAGACCCAGTGGAAGTTTAGCAG
ATTTCTATTCACAGGCATGCTCTCAGAACATCTCCCAGTTACCAATGCCTAATTAATGTCCTTGTGATGG
ATATCCATGGGTCTATATAGATGAAGCTTCTTGAACTCCATTCATAAAACAGATATATAGCCATATAATA
GACATGAGTAATGGACGCCTAGAAGACTAAATGTTCTATGTATTGTTTTTTGTGGTTCCTTCAGTGAAAT
TAAAGGATCAATGTTTTACGTAAGTTTAAACTACTATTGTTGAAATTATTTTACTTTCCTGGCCTTTTGT
CTATAAAGAACACATTAGCATATACTAACCGTGTCTTATTATTGGACACAGTGCTTCTTTGCTCCTGGGG
ATATTTACAGTTATCCCCTCCACTCTGTCCTAAGTGTAAGTATACATTGTTGTGTTTTTGTGTTATAGAT
TAACAGCTCTGAAAATGTGGTCCAAGGACTCTGGGGTCTTCAAGACTATTTCAGGAGGCCTACAAGGTCC
TCCCTTTTCCAGCTATGTAATTTTATTATGCTGGATTTTCTTTATAAATTGAACTAAAGCAACATATCAC
AACAGATTGAATGCCGCAACAGATAGGAGAACACAGCTGTCTTCTATTGAGACAAACATTAAAGAGATTT
GCAAAAAAATGTAAAACAGTGCCACTCAAAATTTTTTGTTTTGTTTTGGAAAACATATTTTTTCATAAAT
AATATTTTTGTTAACATGTAAAGGGTTATTATCTCATATTAATTACTAGATAAATATTTTAAATTTTTCT
GAGGCTTGATTACAAGTACAGTAAATAGTGATAGGTAAAACCAAAATAAAAAGTGCTTTGGGATCCCAAG
ACCAGAAAACTTAAGAACTGCTAATATATACAATTGGGATTATTGCTGTGGTTCTAAAATCAAACTTCCA
TTGGCTTCTCTGAGAGTTTTAGCCAAGTGAGCATATAAAATGTAGTGAAATTAGCCTGCGGTTACGAGGT
TTTAATGAACTGTCTCCTTCACATTTTCAGGTGTTTTTTTTTTTTTTTTTTGAGACAGGGTCTTGTTCTG
TCACCCAGCCACGAGGCTGAAGTGCCCTCCAGCTCTGGGCTCAAGCGATCCTTCCACCTCAGCCTTCCAA
GTAGCTGGAACCACAGGCACATGCCACCATGCCCAGCTATATTTTTGTATTTTTTTGTAAAGATGGGGTC
TTGCTATGTTGCCCAGGCTGGTCTTGAACTCCTGAGCTCAAGTGATCTGCCCACTTCAGCCTCCCAAAGT
TCTGGGATTACAAAGTGGCATGAGCCACTGTGCCTGGCCTCATGTGTCTTTTTATAAATAAATTATCAAG
CAAAGCTGCCACTGTCCTCTTGTAAATTTAATAAGGAGTCATAGGTTTTAGAGTTATGATCCCTTTTACT
TATTTAGCTGATATTTCTTTGCAGTTTGACATAATCTGGACCCATCTGAATTGTAATATGTGACTTTTAA
CAAACATTGTAGATTACCATCTTTCATATGTGATCTCATGCCATTCATGGAATCTATGGCAATTTCAGTA
AGGATAGAACTCATCATTCTTGTGTATACTTGGGATGTTTCTAACCACATTTGCCTCAGTTACCTAATAT
TTTTTGCTTTTCAATTGATTTCTAGTTTGGGGATGAAGAAGAAAAAGAATGTAACTGGCAAAATAGCCAT
TATTTTTTGCCTTTATTCTTATTTCACACTTTCTATTTTTAGTTTATCTTGCTTTGTAACCAATCCTTTA
GAATGTAATTACTTCTTAATTGGAAGGGGCTAACTGCCCCACAGAAGAAACTTCTGTAATTAGAAAAAGA
GTCCCATAACATCTGATCTGGTTCTTTCGCCCTGAGCATATTTGTTGGCAATTTATGGCAAGGTTGACTC
ACTGGTGGGAAGCTGCCTCACTCCTAACCTGTGCTAGAAAAGCTGCCTCGTTCTAGAGGCAGCCCTGCCC
CTGTTAAGCCCAGTTCTGCTGCCTCACTCCTAACCTGTGCTAGAAAAGCTGGCTCTTTCTAGAGGCAGTC
CTGCCCCCTGTTAAGCCCAGTTCTGCTGCCTCACTCCTAACCTGTGCTAGAAAAGCTGGCTCTTTCTAGA
GGCAGCCCTGCCCCGTTAAGCCCAGTTCCCTCTGCCCTGGCATCTCCACCTCTACTGGGGCAGTTTCCCC
AGTTCTCTTCCCAGCCAGCAGCACCCCTGGAGCCTTCCTTTTAGTCTCCGGTCACATGAGTGAAGAGGAA
ATTTTCCTCCTTCTCCGAGCTTAATACAGCAGTTTTATATATTTAACATTGTAGGTGATTTGCATGGCAA
TGAGCTTATTAGGCTGTTTTTTGAGTGCTGCCAAACACCTAATTGATTTTTTCAGTTTTCTTCCAAGATT
ATAGTTGTCAAGAACCATCTGCCTTATATATTACATTAAATGGGTTAAAGCTGCAAATGCTTCTTTAAGC
AAAATATAAGTGTGTATCTTATAGAAAGTAATGCAATATCACCAGTCTGAGGTTTGGAGTGTATTAAGGT
ACTTGGTTTCTGGAAATCTTTTTAAGCTTGGAAACCTTTAAACCTGCGACTTAAAAAAGGATCTACAGCT
ATCTAAGTAGGTGGCCTTCTGTGTCTTGGCTAGTTTTAGAGTGTGGTGTTTGTTTCTTACGCAAAAAGGA
ACAAATTTAAATCACTAGGTACTCAACCAACAGATTTCAGTGTGGATTAGTTAAGAAATAATTGTAGTTC
TTGTGTGGTGGCACAAATTTTTTTCCCTACATTTTGTTTATGCAGACTGTCTTTTTTTCCTTCATCCTTT
TCTTTTTTTCACTGAAAAAGGAAATCGCAATTTTGTTAGTGGATTGCTTTGAAGAAAATACGGAGGGAAA
GAGAGAACCAGACTTGACTTGTGATTACTTTTCATGAGTGTGGATAAGTGTGGGCTTCAAGACTTGCCAG
GCCTTCAATTCTTTGGCTTGCTTTTTTTCTTAACATTTCCAAAGGTTTTGTTAGTGACTTTCAAATGGAA
CTTCACGCCTTGGAACAGTTCCATTAAAAAGTTGTGTGGTGTTAGCCACAGTAGCAGCATGGTTTATTTT
TCCTGTACTAGTTTCACAGAGGTTAACTGAGCTGGAAATGATGAGAGACTAGCAGTGCAAGCGGGTGGGT
GTGTGCTATGTGTATGCTTTTTCCCTCTTGATTTGTGCAAAAAAAAAAATTTTTTTTATTGGCATTAACG
TGTACTTCAAATGTTGTTTAAAAAGGAAGCAAGTCAAATTATCCTAAAATGCTTTATACTACATTGTTGA
AAACTTTCAAAAATGTTCTCTTTTGTTAATTGTATTTTTACATTGCATAGTACCAGCCCACATTTATAAA
AGGCAATTCATTATAGAGATTTGCTTTCTTGATGGGAAATGTACTACAGTTTACAGCTCAGCATAATCTT
AGTTGACGTGTTCTGGAGAGTGCTTTTTATCTGTCTGAATTTAAAAGAACACTTGACTATGTTCATGATT
GAGACGGTTTTATTCCTGGTTCAAATAAATATCTTGAAGTTAAAATATGCGCCTTTTATTCCTTAGGTGA
GTATATTTTTTAAGAAAACATGGTCTGTTATTTATATGTCATCCGCTTGTTATATGCATAAGTTACTTGA
AGAATAGTGAATTTCTAATGAAAATAACAATTACATTAATACTTTAGATTTTAATGCTGTTTTGTAAATT
TTGAAGCAAATTCATATATCTCATTTAATTCTCACAACAACCTCATGATACCCCAGGGCAGATATAATTA
TCTCCATGTTATAGATGAGATGAGAAATGTAAGGCATTTGCCTGAAATTCCCCATTTGGTAAATGAAGGA
GCTGGATCAAGTCCTCACATCCCTGACTCTGCTGTTCGTCTTGCCACTCTCCCGTAAACAGCTGCTTAGA
CCTCCTTGATAGTTTACACCATGGCTTGTGGATGGACAACTGCCATAAAATTGTTTATAACACACACTTA
TTGACTGCTTACAAAGTTTCGCACATTTTGAAATGAGACTTACCCCAATTAATTCCCTCACCAACTCTCT
GAGTTAGGAACTATTATTATATCCCTATTTTGTGGTTGAGAAAACTCAGGTTCATTAGATAGGTGAGTTG
AGCTTCCTAGGGTAATGTAGCCAGTAAGTGGTGGGTACTAATGTGAACCCCAGCAGCTTTGCTCTGAGAT
CCAGGGTCCCTGACTGCTACCGTGCATGAACTCCCAGTGGTTCATGTGCCGGATTTTCAAACGCCAGGTA
TTCACTGGTATTTGTAATAGCATCTGTTTGCATTCATCTGTAATCTTGAAGATCTGACCATGAAAACTTA
GAAATGAGAGGTTTATCCTCTGAATTTACACCGAAATAAAAGAAAAATTTTAAATATAAAATACATATTA
TTATCAGTAGCTATACTGCATGGAGCAGATAGCTACTAACTTGTATAAATCATCCTAAAAATAAGATAAG
TGTTTATTAAGAAACAAAGAAGGTTCATATAAGCTGGGGAAATTTTTTTTATCTAATAAATGTCCTCTCT
GTTGTATAGAGGGTTCTTAAAATGTAAAACTTTTGGGGAGAAATGAAGTATGAAAGGTTTCACCTAAACA
GCAGAGCCATTGTACCAAGGCGAATGTATATACCTTTCAGAACTCTGGAAGTCACTACTGTAAACACTCA
TCCTTGGACTGGAAACCAGGAGCCTCTGGTGGTAGTTTTTTCTCTGTTCCCCCACCCCTCCATTCAACAA
ATGGAATGCCTGTGTGCGCTGGGCACTGTCTGTGCTGTGCTGGGCACACAGTGGTGCTCAGATGGTTCAG
GAGGCAAACAGCCATCAGTCAGTACTTCCTTAGACCGAGAGACCACGCCCTGGGAGAAGGGTGGCTAGTT
AGGTCATGGCAAACGGACATGAGGTGGTCTTGCTGGAGCTGACACCGGAAGAGCAATTCGGGCTTTAGTA
GGTGAGGAGAGGGAAGGGGATGTAGGAGGTGAGCAGAACGCACTGGGAGGAGGCATGGTGAGTAGGAGGG
GCCCAAGGAGGCAGAGAGGGCTGTGGGTGCAGGGTGGGGCTGCAGGGTGGGGCTGCAGAGTCAATCCTGG
GAAGGCTTCTCTATATCTAAGCAGCAGCAGGAGGAAAGGATTTTAAGTACTAGGGGTGAGGTGGGGGGCT
TCGAAAACTGGCCAGAGTGCAGTCTGTGGAACAGATTGTTTTAAGGATTTGATACATGGCAAGGTCTAAA
CCCATTCAGATCCAACACCGGTTTTTAATAACAGATGTTTTATAATACCTGGTTGGAGATCCTGAAATGA
AATTCAAAATACTCTTTCAAAAAAAATTCATATATTGCCTTTACTACAATATAAAGAAAACTAGGTCAGG
CACAGTAGCTCACACCTGTAATCTCAGTACTGCAAGAGGATCACTTGAGCCCAGGAGTTCCTGGCCAGCC
TGGGCAACATAGCGACACCCTGGCTCTACAAAAAAAGTTTAAAAGTTAGCCAGGTATGCTGGCGCACACC
TGTTGTCCTAGCTACTTGGGAGGCTGAGGCGGGAGGATCACCTGAGCCCAGGAGGTGGAGGCTGTAATAA
GCTGTAATGGCGCCACTGCACTCCAGTCTGGACCTGTTTCTAGTAAGACTCTGTCTCCCCTCCCCCACAC
ACACAAAAAAAATTTTAATAAGATAATGTACATTTCCAGTGTAAATACTTGGGTCTTATGAGACTGGGAG
ACATCATGAACGGATGCATGCATCTACACATGGGCTCTCTGAGAATGTGACCACTGCAAATTCAGGCTGT
TAGAGGAGGGCCTCATGTGGCCTTGCCTTCCAGGAGGTGATTTTCCAAAACGATAGACAACTCTTGATAA
TGCTATGATGAAACTGCTGTAAAATCTTCCCTGACCAACAGGGTAATTACATTTTCAGAGAAGTCAGAGG
ATGCCAGAACATGCAAAACATATTTTGTATTTCTATGTAAAACAGCTTTAGGCTCTAAAAGAAGGTTCCA
CATACATGATGATACAGTGGAACGTCTGAAAATTGTGTGTGACAGTTTGCTATTATATGGTATATTTCTA
GTTTTCCTTAACCACTAAATGCCAGTAAAGCCACAAAAATGTTTTAATAGCAGATTAGTGGATTTTGAAT
TGGCCCCATCAAGAGTCACTGTTGTGTTCTATAGCCCTTTCCCACCTAAGTCCCAAGCTAAAGACAGTGA
ATTGTGGTAGCATTTCAGAAATTCCATCTCCACTAGCTGCTGGGTCATGACGTGTGTCTCACTCCTGCGA
GTGCTGGCTTAGGGGCCTTTAACACCTCTGAGCCAAGACTCTGGCATGGAGCCCTTTGCCCATCCTAGGA
GTCTTGAGTCTCAACCCGTGATTATATTCTTGATTGTAGACCTTCTCCCCTGATGAGATCAACCCTTTCT
CTAGGGACTCCTGGAATTTGGCCACTGATGCCTACTTGACTACTATTTTTGGGTCCTGTGGGGACCTCTG
CTGTGTTGTTCCACCCACTCAGAAGGGCTTTTTGGATGGCTTCATCAGTTCAGAACATGTCCAGGCTTGA
GACTTTGTTTCTTGGCCTTCTGCCTGGTAACTCCTTTATGTCAACTCAGGGCTTGGCATCTTGGCTGCAG
CAGCAGTAGAAGGTCCTCTTGGGCCCAGCACCACTGGCCTTCCTCAGGAGTCAGCTCTGCAATTTAACTA
ACAAGCCACGATTCCTGCAGACTGTGAGGGCCATGTGCAAGATAAGCATGATGACAGGGCTAGATGCACA
GTACCTGGCAGAGAAAGCTTTCAGTACGTCTCAACTATAACTACCATACAGTTCCTTTATTATATTGGGG
TTTGTTTGTTTGTGACGGGGTCTGATTCTTTCACCCAGGCTGGAGTGCAGTGGCACAATCATGGCTCATT
GTAGCCTTGACCTCCCAGACCCAAGCAGTCCTCCAACCTCAGCTTCTCAAGTAGTTGGGACTACAGATGC
GTGCCACCATACCCGGCTAATTTAAAAAGTTTTTTTGTAAAGACAGGGTCTCCCTTTGTTACCCAGGCTG
GTCTGGAACTTCTGGGCTCAAACAGTCCTCCTACCTCGGCCTCTCAAGGTGCTGGGATTACAGGTGTGAG
CCACTGCACTTGGCTATAGTTGGCTTTTTTAACTTGAGGACCTTGGGCCCTGGTGTTCATGGATGGGCTT
CAAAGGGTCAGAAAACTCCATGAAATTGTGTGGAAATATTGTAGGCATATATAGTTTTCCTGGAAGAGGG
TTCACAACTTTCATCAGGTACTCAGGATAGGTCATGAGGGACTTCTGTTTTTAGCAATTGCAAACTCAGA
AATCAAGTGACACCTCCTCCTAAGGATGAGAAAACTCAGACTAAATATGAAAAATATGCTTCAAAGCTTG
AAAAAGCTCATGATATAGTAAATATGTTCTCAGTCAGAGTCCAGGGAAAGGTAGAGGCCACAGGAGGTGA
GCCTATGGTTTAGGACTAGGGGTGTCTGCCAGTTACAAAGGAGACGATTAAGCAGCAAGGTGCTTTTGGA
GCATCACAGGACTAGGAGGGCAGAAATTAGAGTCCGTGGTCTGCCAACTGAGCACATCCTGGTGAACCTT
TTACTTGAGGTTGGGATCTTGAAGGGAAGCACCTGAAGAGTAAATGTGAACCGAAGCAGACAGGCCCTCA
GAGAGTGTGCAGTTTACCCTCAGATCATCTCAGTCACTGACCCTGGATTAGGGTAATCCTGGATTGCTAG
TGATTCAGGTGTGACAGAAGCCTCTTTGGAGGACGACAATATTATCTTGGTATCTCAAATTATTTCTGCC
AGCAGTTTTGCAAGTGTAGTGTCGTGTCTGGTGTAGATAAAAATAACTAGGTATACAAAGAGCCAGGATA
ACAAAATTGAATCAGTAGAAATAGCAGACAATAAAACAGACACATAGGGGCTCCAGATATTAGCGTTAAG
ACTCAGACTTTAAAATATTATAAATCAATCAGTGTAATCCACCATATTAAAGAAGAAAAAGCATGTGATT
ATATCAATTGATGCAGGAAAAATGCATTTAATAAGATCCAATACCTATTCATGATTTAAAAAAAAAATCT
CCCAATAAATTAATAGTGGGGAATTACCTCAACTTCATAAAGGGCACCTCCCAAACACGTAGAGTGAATA
TCATATTTAATAGTGAAAGATTGAATACTTCCCCCCAAGACCAGAAACAAGGCAAGGAGATTCGTTCTTA
TAACACTGGAAGTTCAAGACACTGTTATCAGTCAAGAAAAAGAAATAAAAGGCCTGCATATTGTAAAGGA
AGAAAAACCATTGCTATTTGCAAATGATATAATCGTTTACATAGAATATCTTAAAGAATCTACCAAAAAC
CAAAATAAATCAATTGTTAGAATTGATAAATCAGGTCAGCAGAGCTGCAGGATACAAGATCAACACACAA
CAGTCAACTCCATCTCCGTATACTATCAATGAACATTTGAAAACCAAAACTAAAAACACAATATATTTTA
GAGTCACTCCAAAGAAAATAAAATACTTAGGTATATACATAACAAAATGGGATCTGTTTAATGAAAGTTA
CAAAGTGCTGATGAAATAAATGCTTAAAGACTGAAATAAATGGAGAGATATTTAGTGATGATGCATTGAA
GACTCAACTTAGTAAAGATGTCAGTTCTTCTCAAATTGATCTATAACTTTAAAGCATTTCCTATCAAAAT
TCTAGCAAGGCTTTTTATATTCATAGGCAGACTTATTCTAGAATTTATAGGGAAAAGCACAAGCCCTAGA
ATAGCTATAACAATTTTGACAAGAAAACGGGGAGAAATCACTGTATTTAATACTAAGTCTTTACTGTGAT
AGCTGCAATAATTAGATCCTGTGATATTGACAGAGGCGTGGACACATAGATGAATGGAACAGAACAGAGA
ACCTGGAAATAGACCCACACAAATAAGTTCAACTGGTTTTTGACAAAGGTACAGAAGCAATTCAATGGAG
AAATTTCAACAAATGGTGCTTTTGCAGTTGGACATCAACCTAAACCTCACAACTTATACAAAAATTAACT
CAAATGGATCAGGGATTTAAATGTAAAATGTAAAACTATAAAACTTTTCAAAAAAAAAAAAAAAGGCTCT
GGAACTAGGCATAGTTGGTTTTTTTTTTTTTTTTTTTTTTTTTGAGACGGAGTCTCACTCTGTTGCCAGG
CTGGAGTGCAGTGGCGCCATCTTGGCTCACTGCAACCTCTGCCTCCCGGGTTCAAGTGATTCTCTTGCCT
CAGCCTCCCAAGTAGCTGGGACTGCAGGCACGTGCCACCACGCCAAGCTAATTTTTGTATTTTTAGTAGA
GACGGGGTTTCACCATGTTGGCCAGGCTGGTCTCCATCTCCTGACCTCGTGATCTGTCTGCCTCAGCCTC
CCAAAGTGCTGGGATTACAGGCGTGAGCCACCAAGCCTGGCCAAACTAGGCATAGTTTCTATACTTGCTA
CCCCAAGCATAATATGTAAAAAGAAAAATCAACTGTGTTAGGACCTCATCAAAACTAAAACCTTGTGTTC
TGTGAAAGCCCACGTGAAGGACAATGGCAGACTGGGAGGAGATATTTGCAAGCCACAAATAACAAAGGAC
TAGTATCTAGATAATCAAGAAATCTCAAAACTCAATGGTAAAAAACAACCCAGTTAGAAAATGGGCAAAC
ACTATTTCACGAAAAGGTGAAATAAGTTCATGAGCAAAAAAAAAATGGCAAATAAACACATGACAAGATA
TTTCACATCATTAGCCATTGGGGAAGTGAAAAAATAAAACCACAGTGGGCTATCACTACGCACCTATCAA
ATGGCTAAAATAAAAGCCAGCGAGAACTTAAAATGCTGGTGAAGATGTGGAGGAACTGCGTTACTCATGC
ATTTTTGGTAGGAACATGGCTGTGGATAGTTTTGTACCCAAGGCAAATGCTCTCCTGCATCTTCTTAGTG
CCAGCCTTGACAGGCTGCTTGTTGACTTCTTACAGAAGTAATGGAAGCCAGGAGACAGTGTAATGATATC
TTCAAATTCATGGGGGTGGAGGAATCCATTAAAAATGAGACATTTTAGGTAAACGAAAAGTAGGAGAATT
TGTCACCAGCAGAGCTCCACAAAGGGAGTACTAAGACTGTTCTTCAAGCAGAAGGAAAATGACCAAAGTA
ATCCTCCATCTCCAAAAATATACGAAATTTAATTAATCTAGTTTCCATGCTCTGCCTGGCCCAGTGAGTT
TTGGCCCTGGCTGCACATCAGAATTACCAATGGAATTTAAAAAAAAACACAACCCTCTATATCCTTCTTC
AGTTGGTTTGGTGTATGGCTCAGGGTCACTAATGGTACTGGTGTGCAGCCTTGGAAGTAACAGGGTGGAC
TCAGAAGGAGAGAAGAAAGTGGTGTCATGGCTTAAATGGAACACACTGTCCTCCTGGTTCCTGGGCCTCA
CCTTTATGCCTGGTATGTCTTCCTGTGGCAGCATTCGTTCTGGCTAGGCTGAAATGACCCTCCGTAGCTC
TGAGTTCTCCCTCTTTTGCTCCAGTGAGCACCAAATCCCGTCTATCACACCTGTGTGGTATTTCACACTT
TTATCCTTTTCTCTTCATTGCCATTGCCGCCCTTGCAATTTGGGCACCCTTTACATTTTGACTGTGATAG
CTGGTCAGTGGCAAAAACCGCAGTTACTTTTGCACCAACCTGTAGTATCTCAGTTTCCAATGTCATCTTC
CTCTTTCAGTTTGTCTTGCACAGTCTTACCAACCCAATTTTTGTAAAGCATAACTCATGCTACTGCCCCA
TTTAGAGACATTTTTAGTGCTCCCCTCCCCAATGTTCACAAAATAATCTCAAATTTAATACTTTTGAAAA
CAAAATCAAGTTGTTTACCTATTGAATACCCTTTGATCACACCCACGGCTCCTGTTACCACAGCATACAG
GATGCGACATGATTGGAGGTCTGTTTCGTCTCCACCCTCATCTCATAGCACTCCTTCTTCTGCTCGCCAT
GGCCTAGCTAGAGTCTGGGTTTTTCCTTGCCTTTGGGCTGAACTTGCCGATTACTCCACAAGCTGTTTGC
ATGCTCTTTTCTTACCTTTCAGGTCTTGATCCCATGCTTAGTCTTTGGAGTAGCGCCCCCTTGCTTATCT
AAAGTGAATCGTATCCATTTCTAATCTAATCAGCATGCTCTTCATTTCTTTTATTGTTGGTCATCTTCAT
CTTGTTGACTTCTATATGTGTTCGTTGCCTCTTCCCTTTTCCCTCACTGGAATGTAAACCCCTTGAAGGC
AGCCACCTCAACTCTTGTTGGCTGCTACATCTCCAAAGCCAGGTACATAGGAGGTGCTCAATAAATATCC
CCTAATCTATTTTGAATATAGATACACTATAGTAAAGATTTTATAACAAAGGAACTTTCTGACAAGAGAA
TCTTGTTTGTTCAGTGATTTGGACAATGTAGTACTATGTAGTTGGTTATTGAAATTCTGCCTGTTCCCAT
TCTTACATGTAACCTTTGGATGAATGAAGGGCAGGAAATGTGGTAGGAAATGAAACCGTATAGGAAAAAG
CTGATGTCTAGGTTGGACAAAGAAGCTGGAAATAGAATTCTGTCATTTCTGCAAGATCCAAGAGTCTCTA
CTTTGACTATACCTTTATGTCTCTGAAATTTCTGTAATCTTTTTCTGTTGCTTCAATAATAGTAATTTTA
AAAATTTGATAGTCAAATTCCAGGTACTGTTTTTAAAGGGACATTTCTAGAGACGTTATATTTAATAACA
TATTTGAATGGTGTTCTATAGTTTGTTCATTCGTAATTGCGTTGAACAGCTCCCTGTGAAAAATGTTATA
TCCTCACTTTGAAAATGAGAAAAGTGAGGCCCTAAATGTTAAGAAACATTTAAAAAGCTAGTTAAGTTGG
GAAACTGGGACTGAGGTCTTTGAATGTCTAATCCAGTTTCTGTGTCACTACTGGGTTTCCCATCCCTGGG
GCGTCAAGTTTCAACTGAAAGTACCTGTGGCAGGAACTGGAGATGTAACAGACTTGCTTGTCTCTCAAAT
CTGGGAACAAGTGAAGGTGACTACCACCAGGTCACCTTCACATAGCAACACGATGTCTACCTGGTGATGT
CCTTGGTCGTTGTCCCTGCTCCTCCTGTCGTTGGTCCCAGCAGATGTAGTTGTCCAGCTTGACATGGCTG
AAGCACCGTGGGAATCGATTTTAGATATCACATCCAAGGTGTTCCTCCCATTGTTCCCTGCATCTTCATT
CTTAAAAAGGAAATAAGTCTCATCAAAAGTATTACTGCATTCAGAACAACTCACATTTCTTACTCATAAA
AATTGTTTTGGCCTTAAGAGAGATATGTCCTAACATTCCCTCCTCTTGCTGCCTTATGGAAAATGGATCT
CGGGGGAGGAAGCAAGAATAAAATGAGAAAAACGAGACTGGAGGCTGTGACAGCATGCAGGTGAGAGATC
ATGGTGGCTGGGATCACGGTGAAAGCAGTGCCCTGGAGAGAAGCAGACCTATCCAGAGTGTAGTTGAGCT
GTAATTGGCAGGACTTGCAGATGGGCTGCGTATGGAGGATGAGGGAGAGGATTTGAAGGATGAGTCGAAG
GTAACATCTAAAATGTTGACTGGAGCAACCATGTGGTTGGTAGAATCATGTTCTTGGGTGGCAAAGATGA
AAAAGGGGCTTGGGGATGGCTGGGCTAAGAATCTTAGTTGTGTTAAATTTGAGATACCAATTGCACAGTT
GCAGATGTCAGGCAAGCTAGTTGCATATATGATCTGGAGCATAGGAGAGATGGCAGGGCTGGAACTAGAA
TTTTGGAAGGTGTGGTCACCCTATAGAAGTAGGATGCTGGCCAGGTGTGGTAGCCCATGCCTGTAATTCC
AGCACTTTGGGAGGCAAGAGGATTGCTTGAGCTGAGGAAGTCTTGGCTGCAGTGAACCAAGATCACACCA
CTGCACTCCATCCTGGGAAACAGTGAGACCCTGTCTCAAAAAAAAAAAAAAAAAAAAAAAAAGGAAGTAG
GATGGTGACTGGGGCTGGGCTGGGCTGGGCTGGGCTGGGCCTTGTGAGGTTTGAACCCCACCCTGGGCCA
TAGGAGGGAGCACTCAGGCTTTCTTAGTCTTCTGTTGACCTGCCCAGATGCAAGGCCGAAGGGGAAGTTG
GCCTGGAGTTCAGTCTTTTATGACAGAAGACCCCAGCATAGAAATGGCATCCACAATCATGGGACTGTAC
AAAATCTCATGGTCTTGAAAGCCACTGTCCTGACACCTCAAGACTGGAGTCCAGCCCTTCATGACAGAAG
ACCTCAGCATAGAAATGGCATCCAAAATCCCGGGACTATACAAAATCTCTTGGGGTGCAACCTTTGTGAC
AGAAGACCCCAGCACAGAAATGGCATCCAAAACCACGGGACTATACAAAATTTCCTGGAGTCCAGCCCTT
CATGACAGAAGACCTCAGCATAGAAATGGCATCTAAAATCATGGGACTGTACAAAATCTCCTGGGGATCA
CTTGAGCTCCCAGGTCTCCAGTGTCTAAAAATGGGGTTGAAGAGAAAGTACCAGCTAAGTTAGACTAGAT
GAAAAGAAAAATGTGTAGCATGCGGTGTACCAGCAGCAGAAACCAGGGCCACCCTGCTGACCTGCTCTGG
TCTCACCCACACAGTGCCAGGGCGGGCAGTGTGTGTGCATCCTGGAGATGTACAGGTGCAGCCCTGGGGG
AGAGGCAGCCCAGGGCACCGCTGAGTGGGCAAGCAAGAGGGTGCAGGGGTGGATCCCACGGTTTGTAGCA
TGGAGTTCTGACTGGTGAACTGGTAGGGATAGAAGCCAGATTAGAGAAGCCTGAAGAATGAATGTGAGTT
GCAGAAGCAAAGAAGGCAAGTTTAGACAGCTTTCTCAGGAAATTGTGCTAAATGCAGAACACAGAGATGA
GGAGTAATTAGAAGGAGGGAGAGGTAGGATCAAGGAGAACTTTTTTCTTTTTAATCTAGGTAGCTCTTCT
AGCATGTTTGTAATTGACATGAGAAATCCAGCAATGACGCGGGTCACTGCTGCGGAGGGTCCTGGCGAGG
TAGGAGTGGAGGTGATCAGGGCCCAAGTGGACAGCTGCACTTTATAGGAGCAGAGACACTCCTTCCATCT
GAACAGGAGGGAAGACAGGACATGGGGGGTGTGCGTGTGCAGGTGAGCTTGTAAATTGGTTAAATTGGTT
GGTGGTGAGATGAGTGAGTTTCTTGCTAATTGCTATTTTCTCAACTACATATGAGATGAGCTCCTCACCA
GGACTTTTGGGGAAGGGGTGGTGGTGTGATGAGAGAGGAAGCAGGAAATAATTACTCAGGAAGTGGCCAA
GCAAAATGACCAAGGATGCATAAGAAGATTGTGAGGCACTGCTGAGCCCCTTCCCTTCAAGGGTTGTGGT
CAGAAATCCAAGCCAACGCTGTCAGCTCAGTTGTCTGATATTCTCCAGCAGTGTTCAGCTGTGTGGGCAC
CAGGAAGAAAAGCTGCAGCATGGATTCACAAGGGCCAAGGTTTTACACAGCAAGTACCACTGGACTTTAG
AAAAGGGGGCAAGCCAGGGAGATGAGGGTGTTTTCAAAGGGATGATTATTTAAGCCTGGCAGAATATTTA
TCAAATGCATGATCTGCTCCTAGTGAATGTATTTAGTAAAGCACACATTTCCAGGTCTGTGTATCTACAT
ATTTCTGTATACATTCTTATAGATACGGTTTAATGCCATGGTTTCATTCAGGCTTATTTTCTAAAGCCTT
TTGGTTTTGGTTTTTGGGAAGCCTACTCTATTTCCCCCCCCGGAACTAATGAGCGAGCAAGCAAGAGGTT
CTGTAAGCAAAAGTAAAAGCTGCAGACTTTGTTATGGTTGGACCTGTGTGTGGAAATTCTGTGAATTGTG
TTCTGTCAGCATCCTGCTCACGGAATAGGCTATGTAAACAACGGGCGCTGGGAGGGTCTGTGAATGAGCA
GCCTTCCTTCCCACTCACAGACTTAACCACTGCAATTCTCCAGGTTTCTGAGTGTTTATTTCATAGTAAA
AAGGGCTCTAAAAATACCAGGGCAGTTAGGTTTTTATTGTAGATCATTTCACTTAAACTGCAATGGGACA
TATAAATTTTAAAAAGGGAAAAAAAAAACATTGAAGGCAGGATTTTGAAGCAAAAGCTACAGAAATGTGT
CTGCAGTAATTTGTTTTGGCTGTGGATGTAAAACTGCAAAAGGGATGGGAATAAATTTGTTCCATTTTTT
TAAGTTAGAGCAATTGGCGTATTTAATTGATATTCACAGTATTTGAATAGCATCCCAGAATGCACAAATA
ATATGCTATCATGAGAAAATTACATATACTGAGATGTAAATGAAAGGAAATTCTTTTTTTGAACTTAAAA
TATCATTTGTAACTTATGTGTAATTTTTTAATTAAAAATCATAGGGCACATCATACTGTAAGTTTGAGTA
TGCAGAGTGAAATGAGAAAAGGATTCAGGCAGATTAGGCTTGAGGACAGGAGGCAAAGCCCCAAGAGTCA
GTCCAGGTAGGGATTATAAATGGCAGGGTTCGGGAGGAGTGGACATAAAAATGCGAGAGAACAGGAAACT
GCAGGAAGTAACAGTTAGTGGGAAACAAAGAGAGAAGTTACTGAGAAAACAGACACAAACACTGACGTGT
TTCGGACTGCCATGTGACCACCACTGAAGGATGATAAGGTTTACTGAGTAGGAAGATTTGAAATTATGGA
CAGGAGCAATATGTACCAAGGAAAGCAAATATTTTGCTTTTCACTGGATGGAAATTTCTCCCTTCTAGGA
ACTCCTGACCTTCTTTATGGGACCAAGCAGTGTAAGTTGTAGGCTTGTGGTTCCTTCTGACTTCTTGTGT
CTTCTCCCTAGGGGCAATGATGGTGCTGGGGTGTGATGTTTTCAGTATGAAGTTGTGCTTGGAGGCAGTG
GCAAGAGCCAGTGGGAGCTTTTCATGGAGCAGGCTGCATTAACCCACGCGCTGTGTGCCTCCTGAAGCTG
TGGCAGTAGTGGCGTGACACCTGCCTTCCTGGGAGCCTGGGAAGAACCCCAGGAAGAGACAGTGAAGATT
GCATCTCTTGTGGGAGATAGAAAAGAGTTCAGTTTAGTATTGGCAGTGATAAATGCTTGCTGTGTAGGCA
AACAGAATGATGAAACAGAAGACATTAAAGACCTCTTTCTCCCCCTAATTAGGATAGGTTCTAGACATTT
GGCCTGTGTCAGAGAAACAGCCCTGGCACTGAACCATGGAAACTAACATTTATTTCGCACCTACTATGAG
CCAGATCTCTAGCCGGGCGATTTACATGAAGACACTGATGCGTAGTGACAGTAAGTGAGTTTCTTCACTG
AGTGGCAGAACTACTCATTGAACCTAAATGGGTCTGACTCCAAGTCTTGAGACGTTTCCATCCTGAAAGC
GTTCTACCTCAGGTCCTCAAGTAATCTCACCACACACGGTGGTCTAGGTCATGTCTGCACCCTGTTGTTG
GAGATTTTGAACCAGAGGAAGGGGTCACTCCGGCAGAGGTGGGGAGGTCACAGGATGACCTGGGCTTCCC
CCTATGCTGTCCTCTCCTGGTTCTTTCCCTAGTGCACAGGAGATAAAGACACACAGCATTTGAGCTATAG
TCAGGTCTGTGGCTGGTGAGCCCCAGACTTTACAGTGCAGTGGAAAGGGGGTGTTTGTCCTGTTGGAAGA
ACAGATTCTAGGGCCCACCCCCAGAGGTTTGGATTCAGTGGGCTGGGTGGGACCAAGGTGGTCTGCAGGA
TAATTCAGATTGAGGTCTCTGTACATGACATCCTGAGAAACGCTGACTTAGGCCCTCCGGTTTTCAGTCT
TGGCTCCTCCTGGGCCTCTGCATACATTTGTGGCAGACCTAGAAATGATATCGTCAGGTGAGTGTATGTA
TGCAGGACAGGCATTGGAGATGAGCCAGAGGGCAGGAGGTGGGCCTTGGCCGTGACCATGAAGAGGGAGA
AGGGAGAAGGTTAGAGGTATCCAGAACCCAGGAACTGGGGTTACGCAGCTCTCAGATTATACTCCATGCT
CATCCGAACTGCGACTTCAGATACAGCAGCATCAGATGGGAGACGTGCTGGGAGTGCGTAACGCTCGCTG
CTTCCCGTGCATGTGCCTCACTCACTTCTGTGAACTTCCTCAAAGTCAGTTTTATCATCTACTTTTATGG
AATTGAAAACTGAGGAGACCTAACACCGTTTTTAAAAATTATCCTAAGGCCAGGCACGGTGGCTCGCACC
TGTAATCCCAGCACTTTGGGAGGTCAAGGCACCTGAGGTAAGGAGTTTGAGACCATGTGGTGAAACTCCG
TTTCTACTGAAAGTACAAAAATTAGCCAGGCGTGGTGGCGCATGCCTGTAATCCCAGCTACTCAGGAGGC
TGAGGCAGGAGAATCTCTTGAACCCGGGAGGCAGAGGTTGCTATGAGCTGAGATCACGCCACTGCACTCC
AGCCTGGGCCACAGAGTGAGACTCTTTCTCAAAAAAAAAAAAAAAAAAATCCAACAGTCCGAGCGCAGCA
GTCTCCCCCTAACCTCAAAAGCCTCCTCAGAAGTAACCTGGTATCAGTGGGCTGTGCAGATTCTTATAGT
CTTCTTTGCCTTTATATATGAAAATAACTTTGTTTTATGTTTGTTTTCACATAGGTGGAATTATACTGAC
TCTTACTCTGTGACTTGCTTTCTTCACATGACAGTAACTCCTGGACTGTTTCTGTAGCAGCCACACAAGT
CTCCTTTATATTGCCAATATCTATCTTTATCCCAAAGACAAGATGAATGTTCAAAAACGGTAATCCAAAC
TCACTTCTAAAAATGGGTGTGTGTTTAAAGAAGAGCTGCTCAGCTGAGGCAGTTTTGCTGCCGAGGGGAT
TTGAGCAATGTCTGGGGACGTGTGGTTGTCACAACTTGTGAGGGGGCTCCTGGCATTGAGGAGGTAGAAG
GCGGGAATGCACAGGTCAGGCCCCTGCAACAAGGAATTGTCAGGCCCAAAATGCCAATGGTGGCAACACT
GAGAAAATGTGATCGGTTTAAACCTGCTTATCTTAATGGTGTTTCAACAGCCTTATTAAGGGGCTTGACC
AATATGTAGTTTATCAACACCAGCCTTTGGTGTAGTGGGGTGAGTTGTGCTCCTGTTGGAGAAGCAGATT
CTAGGGCCCCACCCACAGAGTGCATACTTGAGAGGCAGAGGTGTGAACATTGCCCTTGAGCTCAGGAGCT
CCACAGCAGCCTGAGCAACATACTGAGAGCCCATCTCCTAAAAAACAAAAACAAAAAAGTGCTGAATAAT
AAGTCCATTTTAAACATATGATAAGATTTCAGATTTTCTGAGGAAAAAATTAATTAGACTTGGCTTCTTC
TCTGACTTGAAATTAGCAATACTTTTATACATCTCAAAGTGTGGTTTATGAAAGAGGCAAAATTGTCAAT
GACTACTTGTTGAATTTTGCTTCCTAACCATGTAATGGGGACAAGTGTTTCCGAAAACATGTTTTATATG
GTTAGTTTTCCTGCAGATGGGAATTGTTCGCTGAATTATACTTTGTCCACTTAGGCTTAGGTAGATATGG
ATTCTGTGAAAGTGGAAATCATTGAACAGTTTAAATACTGGATTAAAAGAAAAGGAACTATGGTAATTGC
AGATCTGTTAGATGGAATCTGTCGTGCCCTAATAAGAGTGATAAGGAAGACCATTAACTGTTGGAAGCAA
GTTGTTGGGTTCGAGGTTGGGAATTGGGCATGATTTGTTTCCTGTGTCACTGCTTAGGTTAATTTACTCA
GACTGCCATTTTTGTGTTGGAAGGAAATAAGGTCTAGGCCCTAAGCTTAGACTGTCTTCATGCCTAAAGA
AGTCCAACCATTCATTATTACTTCGCTAAAGGATGCATTAACATGAATATATATAATAAAGATAATGACT
CCTTTTTTCTCAACAAATTTTAAATTAACTTAAACATGCCTGATTTTCAGAAAGAATTAAAAGTAAAACC
ATACCTTTAATTTAGGACTGACTTCTGCATTTCGATTGTAGATTATTCTAATATGAAGAGTGCTATTTGC
ATGTTGGAATATCTTTTAATTCTTAATTTGTAAGTTACAAAGAAATAGGAGACTGAAATACTTTTTATCT
TACAAAATTCCAAATACCTTTTCAAGCAATTTATATCTTATTTCTATAATAGTTTTATCACCAGCCAATG
GGTATGCACTGTATGTCATAATATGGAAAGAAATTCTTTATCATTTCAGATATTAAGGATTTCAGATTTT
AAGAGTTATCAGTGAAACTGTGTTACAAGAATATTTTGTTCCTGAGACATCTCAGTATTATAGGTGGCTT
CAGACTAACAGGCACAGAATAGGATAGTGTGAAGTATCTGATTAGCTTTACTGTACTTGGTACCTTTAGG
ACGTTCAGCCAGAGGTGATTGGAGGGATTTGCACGTCTACCACTCGTGTGTGTATCTGTGAACCATATCT
CCTTTAGTGCCTGCTTTTGAACTTTATATAAACAGAATGATGCTGCCTGTTTATTTCTATAATTTTCTTC
TTTCCCTTAGCATGTGCTGTTCTTGGCCCCTTGCTTCTCCATGTGAATTTTGGAAAAGCTTCTGAAGTTC
CACCAAAAACCCTATTTGGAATTGTTACTGGTACTGCATTGAGTTTCTATGCCAGAGAACTGACATCTTT
GTGACATTGAATTTTTCTTGCTAAGATCCAAGGTCTTCCTTTATGCAGACCTTTCACATGTATTTTTAAC
AGTTTTGTAACACGAATCTTCTTTGCTGTCTTGTCATGTAATGCTTTGCCGGGGAGTGGTGGTCCATCTT
ACTCTGTAGAGGACATTTCTTTCTTTTTTTAGTGAAGTAAATGTAGGTGGTGCTTATGAGTTGTTTTAAT
TTCTAGTTTGTCTTTGTTTGCAGGGGGAAGTGATAATTTAAAATTGTGTTGTAAGAAAATTGGCCAATTT
TCACCATGGTATTTAATTTAGAAAAATATAAGTCACTTGCAGGTAATTTAGTCAGTTTGGGCATTTTGAT
ATTAAGTAAACAATTCCAGTATAATAACATAAATGCTTTCCTAGATGTTTACATATAATGCCATAATTAT
GTAAATAAATAAAATTCATTTAATTACATTAAATTTTTTTAATGTTTACATTAAAAAAAGGGGGGGAGAA
GCAACTAATTCAGCATTCGGGCACAAGTATTTTATATGGTCATGGTCAGAGAGCCCTCCAGGTATTCGAC
ATGGTAGCATGGCCACAGGCCCAGGACTGAATAGACTGGTTTGAGGAAAGAGAAGGTTAAACACACTGAT
TTATACCTGAGAAATACATTTTGGTGGGCCAAAAATAATTGAGTGTATCGGATGGAACTAACAAAAGCTT
TCTTTTACTAACCAGTTTTGCAGGAAAAACATGTTTTAAAATATGTAGATATGCATTATAACTTCTATTT
AAATACAGCTGAGGTTGAATTTCTCAGGACCCCTTTCAGCAAAGATGGCCCTTTGCTTCTGCTTTTCCTG
TCCGTCCTGGATGTTCTAATCCCAGCACCCGAAGGTTACTGCAAGCTGAGTGGCACCAAAGCAACACCGT
AGCCAATGAAAGTACATCATCATTGGTGTGCAGGTTCTGGTCAGTGTTACCAACATGAGTTAATATCTTT
GAAGTAAAAGCACATAGCGATGTCATGTTTTCCCAGTATTCTGTGGGTATTTTATGACCTGCAACTTAGG
AAAGCAAATTGTGAAAAAGAAAACTTGTTGTGTTCTCCTATAACAAGGTCACAAGGGAATCCTGCAGCGA
TTATGTTCTTCACTAGCTGTAAGAGAGCAATCTGTGCTCTTGGTTTTGACTCAGCTGGTCTTTATTGAAT
GACTATTGTGTGGCTCCCAGCTGTGGTAGGAATGTGAAGGACAGCGAGGCAGTGCCTGCCGTGGAGCGCC
TGCATGCTAACGGTGGACAGAGGAGAGCAGGCTCACCGTTACACTGCAAGGTGACCTTGGAAGGTGCAGG
GAGAGAAACACAAGGGAGGAACCACAGAGACTCCAGAACAACATCTTGCCCAGTCAAGAACTAGAACAGG
AATCCTAGAGAAAGGTGAATTTTGAAAGATGGGTATGATTTTGGCAGCTAGAGATGGGGGCGGGGAGGTT
GTTGGGTTTCTCAGAAGAAGGAAAAGGTCTGGAGGTGGGAAGGGGCTGGGTGAATTTGGTGACCAGCCAG
GAGTCTGATGTCACCAAGTCACAGGGATGAAAGAGAAAGGCAGGGGAAGTGAGTTTGCGCAGGCGGGCTG
AGGCCATGTAGGGGCAGGCTGGAGTAGGGGCCGGGAGCCTTAGGGGGTGACAGGAGAGGTTTTCCCACCT
TTTTTCTCTACTCCTTCCCCAGTCACCTTCCCCTGTCCCAGCGACATCACACATGCATTCTTTCTGTCTT
CCCCTTGCCTCTCCCTCCTCCACTTTGTCTTCTTCCCCAGCCCTCAGAATCAGTTCAGATGCCATTGTCT
CTGGAAGTACCCCAGAACCCAGCAGTTGGAACTCATCTCTCCTTGCTCTGTTCCCACAGCGGCTGCCTCA
CCAAGAGTCATTCCAGCACTCAGCAAGCTGGCTCACGTGATGGCTATTCCCACCTGCAGCACCCTTCACC
AGGCTGCAGGGCTTCTCACCCCAGTGGTCCCAGGAGAGTGGCTTGAAAGCAGATCATCCTCAACCTGTGT
TTGTTGAATGAATAAATAAGGGATCCCTATTTATAAGCACGTTTTTCTTGGAGATGGAGTCTTTCTCTAT
CTCCCAGGCTGGAGTGCAGTAGCGCGATCTTGGCTAACTGCAAGCTCCGCCTCCTGGGTTCACGCCATTC
TCCTGCCTTGGCCTCCCGAGTAGCTGGGACTAAAGGCACCCGCCACCATGCCCAGCTAATTTTTTGTATT
TTTAGTAGAGACGGGGTTTCACCATGTTAGCCAGGATGGTCTCGATCTCCTGACCTTGTGATCCGCCTGC
CTCGGCCTCCCAAAGTACTGGGATTACAGGCGTGAGCCACCACGCCTGGCCAACACCTTTTTTTTTTTTT
GTATATTTTGTATAAAGAGATATGCCATGGAGAGCAAAGTGGTGGAAATTCTAAAAGACTTTAATGATCA
GATGAAGAAATTGTTTAGAGAAGCATAATATACGTGCTCTGTCTTAGTTTGAGAATACTGACCACAGTTT
GGCTCTCCTAGCCCTTTGCCTGAGCAAAACCCACAACCCTTCCTCCACACCCAGACCATGTTCCAAGCCA
CAACCCATTGCTCCAGCTTTCCTAACCTGCCTGCGAATGTGCTGCCTGTTACACGAGGGAGCAGATACAG
TGAGGCAAGGACAACTAACAGCACCCAAAAGCAAGGGCAGTGGATTTCCCTCTGCTTTATTTAAAACTCC
CCTTCTTAGGAAAGTTCACTCGCATGATCTAAGCACATTCAATGGCTTTTCACACATGAGCAGAGTTTCA
TTCTTTTACATGAATCGAAATTGGGCTTAAAATCATTTTAGATACAGCCATCTTGGTTCCCATACTTTCT
ACTCATGAAAGATTTTATATCAGTGGTCAGGATGATAAAATCTGTACATCTTTATGTCTGAACCTGTTCA
TTTATATCCACATCCTTTTCTTAAATACTGATTTGTATATTTAGAAACTCAGTGCTTCATTAGTAAACTG
AGGGAGTTAGAGTAAAGGATCTCCAAGATCACTCTGCCAGCATTTGAGAAAGAACCTATTATTATATGAC
TATAGGAATTTATTTTTGTCCAAGAGCCAATGCCTAATCTTTAATGGTTTTGTGTTTAGACTATTTACCA
CTAGGTGGCGGTAAAAAAAATTATTCTTAGCAATGAGAAATGCTCATCAATATTTAAGTTTACTATAAAA
TAAAAATTTAGAGGACCAAAGTTTGAGGTGTCTGTTTGAAAACTACGTAACCATATACTGGCCTCTGTAT
GTTGTTTCTAGGACTTAACACTTATTTTATTCAGGGAAAAAACTCTTGTGGCACTTCATAGCCACTTATA
TTACAGAATTATGGAAAAACGTAAATTAAAATATGTAATTTTGTTTCATACACACACACACACACACACA
CACACACACAATGTGTACGTGTGTGTGTGTGTATGTGTATATATAGAGAGGAGAGAGAAAGGTTAGGTAC
ATTCAAGGTTTCCGGCATCCACTGAGGGTCTTGGAGTGTATCCCTTGCAGATAAGTGAGATACTACATTT
TCATTTTTCCAGGACATTATATGTTAAAGTCAGCTCGTGCAATGCAGACATTGGAAGTTTAGTCATGTGC
CTTATAATGACATGTTGATCAACAACAGCCTGCATGTACAATAGTGGTCTCATAAGATTATAATGGAGCT
GAAAAGTGTCTATGACCTAGGGACATCATAGGTGTTATAATGTAGTATAACACATTGTTCACATGTTTGT
GGTGATTCTAGGTAAACAAACATCCTGTGCTGCTAGTCATAGAAAAGGATAACACATATAATTATATATA
GTACATAATTACTTGATAATAATAAATGGCTGTGTTATTGGTTTATGTACTTAACATACTATACTTTTTG
TTATTTTAGAGTGTACTACTTATTTAAAAAAAAAAAAAGTTGGCCAGATGTGGTGGCTCATGCCTATAAT
CCCAGTGCTTTGGGAGACCAAGGCAGAAGGATCACTTTAGGCCAGGAGTTTGAGACCAGCCTGAGTGACA
TACTGAGACCTACCTCTACAAAAAATAAAATTAAATTTAAAAAATAAGCCTCAGCTTATTCAGTCTCAGC
TACTTGAGAGGCTGAGGCGGGAAGATTGCTTGAACCCACGAGTTGAAAGTTGCAGCGAACTGTGATTGCT
AGCCTGGGTGACAGAGCAGAGCAATACCCTGTCTCAAAAAAAAAAAAAAAAAAAAAAAAAGAGTTAACTG
TAAGACAGCTTTAGGCAGGTCCTTCAGGAGGGATTCATTCCAGAAGAAGACATTGTTATTACAGGAGATG
ACAGCTCCACATATGTTATTGTTATTGCCCCTGAAGACCTTCCAGTGGGACAAGATGTGGAGGTAGAAGA
CAGTGATATTAATTACCTGACCCTGTGTAGGCCTCAGCTAATGTGTGTGCTTCAGTTTTTCTCTTTAATA
TTTAAATTTTTATTGATACATAATATGCATACAGAAGTACATGCACAAAGCATTAAGATAAAGCTCAGTG
AATTATTACAAGGCAAATACATTTTTGTAACCACAAGATAGAATCAGCCTTGTTCATGCTTCTGACATCC
ACTTTCTTCCTTCTTCCTCTCCAAAGGTAGCCAAAATCTTAAGAGCTAATGTTATGGATAAACTTTGTCT
TTTTAGACAAGTGTTTTATTACAGAACATTTTAAACATATACAAAATAAACAAAATGGTGTAATAGACCT
GACACTCAGCCTCAACAACTACTCATCATGTGCTATTTCTGCTTCATCTATACTTCAGCTCATTCCCCAT
CCCTTTATTTTTTTATTTTTATAAGATAAGATGTATGTGCATTGACATGTATAATCTTTATTGTACCTTT
TTGACAAATCAGTACACCCATATAACTTTTTATCCTCTTAAGAATAGAATACCGGCTGGGCATGGTGGCT
CACACCTGTAATCCTAGCACTTTGGGAGGCTGAGGTGGGCAGATCACTTGAGGCCAGGAGTTCGAGACCA
GCCTGGCCAACATGGTGAATCCTTATCTCCACTAAATACACAAAAATTAGCTGGGCGTGGTGGCACACAC
CTGTAATCCCAGCTACTCTGGAGGCTGAGGCAGGAGAATCACTTGAACCTGGGAGGCAGAGGTTGCAGTG
AGCTAAGATTGTGCCATTGCACGCCAGCCTGGGTGACAGAGCTAGTAACAATCATTAATGTGCATATGAA
TCACCTGGAAATATTATTTTAAATCCAGATTTTAATGAAATAGGTCAGATTTTGATAAAATAGGTCAGGG
TTTTGTCTGAGAGTTTGTATTTCTAACAAAGTACAGATTCATAGAGCACATGCTAACTACAAGGTCTCTT
TTATCTAAAGTAAATAAAATTTGATGAATAAACTAAGGGAAATTGACCTTAGATGAAAGAACACATCAAA
ACACATGTGCAATATGCTATCTGTAGGAGCATTTGGTTAACGAGCATAAACCAACCAAGCAATTTTATAA
TTATTTTAATCCAAAGTTAGCGAAATCTCTATTATGGTTTCCATGGAAATGCTCCTTCAGGCTAAGAAAT
GTTAGTATCACCAGAGGGCACTGGTTAAAAACACCACAGATTTGGAAGTCGATGTCTTATAAAGTAAGTG
ACAGACCCCTCTTTACACCCATAAGTGGCTTTTACAGAGTTACCCAAAATTCAGTCATTTGTACACCAAG
TGTAGATAATTTTCATAGCTTCCTATTAAAATTATATTTTAACGCCCTTACAAAATTTAACTCAATTTTC
TTATAAAATGAAATAACATTTTTATATGACATTGTTATTCAGCTTAAACATACATACTTGTATTGGGTGC
TGTGTCCGTGTGTTGACCACCCAGTGTTCTTTGGGGTTCCACTCTTTGCACAGGCACCACAGCTGGAGAA
ACACAGACGCACAGACACAAGCTGGATCCTGCGTCTCTTCCTGCCTCCGGGCACAGGGCGCCAGTCAGCC
TGGTTGTGCGAATGGAGGTCGTGTTCCTTAGCACAGAGGGACTCATTCCAGGGCGCTCCCCTCAGAGGAG
GAAGAGACCGGAAGGTCGTTTTAGGGGGCACTTCCTGGGACATGGGCCAAGCCTCCTAAGGAGTGAGGGC
TCCAACCAGCAGGTACAGACCTCTCAGAAGTCAGGGATAAGGCGGCCATTCTGAACCTGGATCTCCACCA
CCCCTTGTCCCATCTCATCAAGACAGTTCTGAGGGGCTATTCTGGCACATGTCTGGACGTTAGAGGCTGG
AGGACAATGTGGGCTTTGATGGGATTCAGATAAGGTCTGTTCCAGGGAGGCAGGAGGTTGATGCTCAGCA
TCTGGGATGGTGTCCTTGTGGACAGTGAGTTGCCTCTTTGGGTACAAGTCCATTTTCACTACAGAAGAGA
CTAGAGCAGGGGTGTCCAATCTTTTGACTTTCCTGGGCTACATTGGAAGAATTGTCTTGGTCCACACATT
AAATACACTAACACTAGTGATAGTTGATGAGCTTAAAAAAAAAAAGCAAAAAATAATCTTATAATGTTTT
AAGAAAGTTTACAAATTTGTGTTGAGCTGTGCACTGACAAGCTTGGGCTGGAGAGTCTGAACGGCTCCCC
GATCCCCTCTCTGATTCTCTTTGGCAGCAAGGCCTTGAAGGGGCTGAGTCTCAGTGTCTTGGGGGAATTC
TGGAAAGCCTGTTTGGGAACCTGAGAAGACCTCTTGCCTGGAGCTTGAATGCTTGATTTGCTGTCCTGGC
CACATGCATGCTTGGCAGCCAGAGAGCGGGGTTTGCATTCACACCAGCACAACAGTGAGCCAGGGGTTGA
AGTGACCAGGACAAGTGTCTGGGTGGCAGTGTGCCTCAGTTTTTAACAAAAAAGTTTAAAAAGTAAAAAA
AAATTAAAAAATTAAAATAGAAAAGCTTATGATATAAGGATATAGTGAAAGAAGATATTTTTGTACCGCT
GTACAATGTGTTTTAGGCAAAGCATTGATTGTAATAGTCCAAAAGTTCAACAAAAATAAAAGGTTTATCA
AATTTGAAAGTTGCGGTAAGCTAAGAATAGTTTATTGCTGAAGAAAGAAACAAGTTTTTAAGAATTTAGT
GTAGCCTAAGTGTACAGTGTCTGTGAAGTCTACAGTGGTGCAGAGTCATGTCTTCGGCCTTCATATTCAC
TCCCCATTTACTCACCCAGAGCAACTTCCAGTTCTTCAGGCTCCATTCATGGGAAGTGTCCTATACAGGT
GTACCATTTTTTCAGTGTTATACCATAGTTTTACTGTACCTTTTCTATGTTTAGATAGGTTTAGATCACA
ATGTTACAGTATTCTGTACAGTCCCATGCTGCACAGGTTTGTAGCCCAGGAGCAATAGGCTCTCCCATGT
AGCCTAGGTGTGCAGCAGGCTGAGCCATCTGGGTTCATGTAAGTACACTCTGTGATGTTTGCACGCAAAG
AAACTGCCTAACGAAGCATTTCTCAGAATGTATCCCAGTTGCTAAGTGATACATGACTGTAATATCTAGG
GAACTATTTGTGGCTATTTTAAACATTACTTAAGAATTATTTACAATCTCTCATCTCACCCTCTGAATCT
ATCAAATGTCAAGACGGAGCTCATACAGTATTGGGAAGTCACCCTCCGTGAGCTGGTCCCAGGCCCAGGG
TGTGAGTGCTTCTGGGAGGCTGTGGGTTAGGGGAAAGCCTGGGCATGGTTTTGTTTAACATCTACAATCT
TAACTGACCCTTAGCTGTTACTGCTCAAAACTGGTTTCCTTCAATTACATACTACATTACTTTCCATCTC
AACCAGGTTTGTAGCGCCTTGCGCTCTAATTTTTTAAGGGTGGATTGTGATATACAATAACAGTAGCCAC
CTGTTTATGGGTGGCTTAATTGAAACTTTGCTGAATTGAATTTGATTAAAAACTGAGCCTGGGATTTTCA
GTGAGATGCCACACTTAGAGAACATAGTGCCTCACACATTGTAAGCACTTGGTAAATTGTGGTTGTCACA
ATTGCTAGAATTCCTTCAAGAAGTCAATTCTCACAAGTGAGGGGCATAGGAGAGCTCCCCAGGCAGAGGG
GATTGGACATACTGAAGTCCTGATGGCCCAAAAAGCCTGTGGCCCTCCAGGGTCGCAAACAGGCTTGTAA
GGAGAAGTCAAGCCTGGTGGCGGGTGTGGGGTGTGCTGGTGAGCCAGGCTGCTTCACTTTGAGAAGTTTG
GGCTTCACAGTAAGAGTAACTGGAAGCTGTAAGGGTCTCAGACTGAGAGCATTCAGATTTGCATTGTTAA
AAACTATCCCAACAGTCTCATGGACAGTGGATACAGGGAGGTTCATTATAAGGTTTGGCCATAGAGTAAA
TAACTAGCCTTGGGCAGGCTGCTTAAACTGTCTTGATTTCCTCCTCTTTAACCCAGATTCAGTAACAGTA
CCTACCCGTAGGCTGTGAGGATTAAATGAGTTGCTATTTGTAATTGGCTTAGAACAGCCCCTGGTGTGTA
GTAAATGCTTTAAATGAGTGTTAAATAGAATGCAAAAGTCTGGTTTCTGAGCAGAAGGTTGCATTCTTCT
GACACTGCCCTCCCCTCACCTAGCATCAGACTGACCTGCTCTGTGCAAACCCAGACTGCTGCCGACTTGG
AGCCCACCTACTTTCCAAACCAAGTCCTCCCTTCTCTGCCTGGGTCTGACTTGGACACCTCCGCGTGGAT
TTGACATATGGCTGGCCAGACCTGGCCGGGCTTTCCCTTTTCCCAGAACACCTGCACTGCACCCCACTGG
GGATTCAGGCTCCATCCTGGCTTGCTAAGAGCACCAAGTGCTCTCCCTGCTGTGCAGGCCCCACCCTCCG
CCTTCGCAAGTTCAGTGGAGTCCAGCAGTAAGCGCAGCTGGCAGTAAGCACTTCCACAGATGGCACGCTG
GCTTGTACCTGAGCTCCCTGACTCTGCCCACCCAGCCATGGCTGCTCCCTCTCTCTCCCAGATTGCACTT
GGTGTTGGAAGAGAACACCACCAACATGGAGACGAACTCTCTTGGGGCTATGGTCAGCTCCTATTTGCTT
TCTGTATTTGCGGCAGATTTGAACTGAAAGAGGGAAAAAACAATAACAAGCAAGTGGCCCCATCCTTCTC
TCTACCTTAAGCAAGGTTCACTCTAACTCTCTAACTCTGTAAGGTTCCTGTTTTTACCCCTTTCCAGTGG
ATTCATTTTTTTGTAAATCATGTAGTACATATTACTGGGGGTTTTTTGTTGTTGTTTTTATTAATCATGA
ACGTCTTCTACTGAGTAGTAATGTTTTAAAGCTACTTTGTTAACTTGCAATTCTAATTTGAAAACTGTAG
ATAGGATGTCATGTAGAAATGGCAGGTTTCCACTTACATGACTTAGGAGTGTTGCCTGGATTCTCTTTTA
AGGATACGGAGGCAGGGGTGAGCTCACAGGGAGAAAGTACATGATCTGCACAAAAGGATGCATCCCAGAT
TCAGGGTAGAGTTTCCCCCAGGGGTAGGGCTGTTGAATCATGATGGGGAAGGGCAGAGGGCATAGAAGGC
TTCTTCTGTATTTCTAATGTTTACTGATTAAGCTTGAAGGTTTGTGGAATTTGACATAATATTTTGTATC
TTTTTGGATGTGTGAGATACTTTATGATGAAATTGAAATGACCACCGTGATAATGGTAACCACTCAGAGT
GTCACTGGTATGTGTGCCACGTGCTTGTCGTCCCGGGTCTATGGAGCCTGCCTGCCCATCACTGAGGCAC
CCTTAGCCTCCACCCTGGATTAGACTGTCATCTCCAAGTATTTGTGTATGAAGTTACATACATACATTTA
TATGCACAGATGCAAATTCATTTTATCTTGTAATGTGTTATCACAAAATGCAGTATAGGACTTTTTTAAA
GATCAAATATTTCCAAATAAAACTTTTTCAAAAAATATTTTTCCTGGTAGTAAAAGAAGCACATACATGT
ATGGAAGGCTAGGAAATTGTACTTAAGTAGAAAGAAGAAGAAAAAAAATATATATATATAATGTTAATAT
AAATGTTAGCAGTCTCTAGGGTGGTACTATTATGGGTCTCTAGCACCACCCTAGAAACTGCTAACATTTG
GTGATAGCTGTGATCTAAATATATCCCCTAAAATTCATGTGTTGAAACTTAATCACCCATGTGATAATAT
TAAGAGGGGCTTTGGGGGTGATTAAGTCATGAGGGCAGAGCTCTCATGAATGAGACTGGTGATTTTATAA
GAGGTGGAAGAGAGTGCCCTGGGCCCTTTTTGCCCTTCTGTCCCTTTCACCATGTGAAGACACAGCATTC
ATAGTGTCCGTTTCCTCTAGAGGGCACAGCAACAGGGCATCACCTTGGAAGCCTTCAGCAAACACTGAAC
CTGCCAGCTCCTTGGTTCTGGACTTCCCAGCCTCCAGAACTGAGACATAAAGTTTTGCTCTTATAAATGA
CCCAGTCTGAGGTACTTTGCCATAGCAGCACAGACTAAGACAGTGATGTTTTCTTCCATTGTTTTTCCAT
TCTCATTTATGGATTATTTTTATATTGATGAGATCATTTCTGAGTATAACATTTTACATCTTTCTTCATT
TAGTAGTATAATATAACCATTTTAAATACTATTAAAATTATTCATAAACTTTTCTTTTCCTTGGAGACAG
GGTCTCACTCTCAACTCCCAGCCTGGAGTGCAGAGCCTCAATTTCTGGAGCTCGAGTGATCCTCCTGCCT
CAGCCTCCTGAGTAGCTGGGACCACAGATGTGCACCACCATGCCCAGCTAATTTTTTTGTATTTTTTATA
GAGGTGGGATTTCTCTGTGTTGCCCAGGCTAGTCTCGAACTCCTGGGCTCAAGTGATCTGCCCGTCTCGG
CCTTCCAAAGTGCTGTGATTATAGGTGTGAGCCACCGTGCCTGGCCCCTTTGTAAACATTTTAGTGGCTT
ACAGTGAGCCACTATATAAGCATATTAATCATTCTCTGCTGTTAGACAATTTTTACTATATGAGAAATAA
CCACTATAGTGAACATCTTCGAGCATAGTTCCTGTCATCATATTTGCATTTATTTCCTTAAATGTATGCC
ACATATATCAAAGGTTCTGAATATTTTGAAGACATTTAATATATTTTTTTCAAGTTGCTTTCTATAAGGC
AGGGCCTCTGTTAGCCCGTAATCGGTCTTTGTTCAGGTGACAAACCTCTAGGCAGACACACCCCTGGAAG
TCCAAGCTTCATGATGGGTTCCGGGCTGTGTTGCCTCTGCTCACACTTTGGGCGCCTCGGTGCCATTCAC
AACTGCACTCTGTATGGAAGACCCTATTTCTATTCCTCCAGGAGCTCACACAGAGTACATGTTTCATAGA
ACCCCATACAGCTTAGCTATTCATGTCTGTAAAAAACTTGAATTCATTAAGTGAAAGTGCCATACAGGTG
TTTTACCCTACCCTTTTTGATTATGGAGGATGAACATTCATTTATGTGTTTCTTAGCTATTTGTATTTTA
TGAATTATCTATTCATATTCATTGTTATGCTCTTAGTGTTTGTCGTATATTTTGTACATTAATTTGATAA
TATAGAATCTGTACTGTTTGTTGTTAACATTCTTCTTAGTTTGTGCTCATATTATTTTTCTGGTAAACAC
AAGATTTTATTTTTATTGAGCACAGCCAAGCCTCTTCCCTGATGATTTACTCCCAGGATTTTCAGTTCTC
AGAGTTCTTTCTCATTCAGATACTTGAAAAATGTTCATGTTTTCTTCTTGTGTATTATTTCATTTTTACA
TTTATCTCTTTGATTTACATTAAACTGGAGTATATTTTGATGAATAATACCCGGTGAGAATCTTTTTTTC
TTTTTACAGATAGTTTTTGAGGCACCATTTATTACATAATCTGTCCTTTCCCTACTGATTTGTGATGTGT
TCTCTATCTTATATTAAATTCTAATATCTGGATCCTTTTGTAGTTCATGAGCGTGATGATTGGGTGTTTC
ACGCATGTGTGTGCAATGTGCCACCCTTGAACCTTGTATGACATCGGCACGTTACCCATCTGACCTCAAA
AAAAAAGCAAAGAAAAATTATCATCTCTGTTAAACATATTTTACTGAGTTTAAAAACAATAAAGATTCCA
TTCTTAATATAGGTAAAGCACTGCTCATTGATGATATATATTTTTGTTTCACTGCTAATGTTTGTTTAAA
TTGACTTCTTTTTAATGTGTTAACTTTAATGCTAACATTTCTCTTTTACACTTTGAATCAAAGTAAATTG
GGTACTTTGACAAACAGATTTTTTTGTTTCATAGAGACCACCCCCATGTACAAATAAATTGTAGGCATTG
TACATAAAAGGCACTTGCATTTACTTTTAAAGAAGTTAACTTTTTCTGTTTATGTTTTTTAGGGTGTATT
ATCTCATATACTTTCAGCACTCAGATTTGATAAAGAAGTTGCTCTTTTCACTCAAGGTCTTGGGTATGCA
CCTATAGATTACTATCCTGGTTTGCTTAAAAATGTGAGTATTTAAAATTTATCACTTTTGAAATGTTTAA
TGCTGAATGTGCCATCAGCAAAAAGAGTAAATGGAAATATTTCAGTCCTCCAGAAGAGATGTTTAACTTT
TCTTTGTTTATCTCTTCTTACCTTGGGCAGACTTATGGCCATGTACGGAAGAAATGTGAGATGGGAAGTT
ATGAGAAAGAAGGAAACCAGGAAGGGTTTTCCTAAACCAACCAATCAGCCTCTCTTTCTAGGGACACATC
TCACTTATTCACTCAGAGATGTTTGGGAGAAGAGCTGTTCTTAGCTATTATAAACACAGTCTTGTACTGT
TGAAAGAATCTTGTATTTCAAATAACCTGATTGGAATTTTCTGTTAAAGCAAAACAGAAAATTCAGTACA
TAGTTTTAAATATTTACCTCTTAATATTAAAGCATTGTTTTCTTCTGGCTTAAATTATAGCCAAATGTGA
GAAATTTTAACTTACAAACTTGATGTAACTCTTCTAAAAAATGTTATGAGATTTTTTAATGTTTGTTAAC
CATTCCGGTGTTTTGGAAGCTTTGTACAATAACAACTTTTTTTTTTTTTTCAAATGAACTGAATTTTAAA
TGAAGAAGTAAACTAACTTTTCTTTAAATGGATTTGGTTTTAATTCTTAGGAAATTAATGACCTGTCTAT
TGTTCATTGCTTAAATAGGAATGCAGAATTATAGACATTAAACATAAAATCCCAATTATTAGTAAATGTG
ACATGGCACTGCTTCCTTTTCACTCTGACAGAGTGAAACATGAGAAGATGGGGGTTGGGGGAATCTCAAC
GGAAATATCACTCACACCAAGAAAAATAGAACTGATGTAATCCTGTTTGCAGCGTGAGTTAACCTGCAAC
TGATTTTGTTTTACAGATGGTTTTATCATTAGCGTCTGAACTCAGAGAGAATCATCTTAATGGATTTAAC
ACTCAAAGGCGGTAGGTGTTAAACTAAACATCCTTCTTCTCAGGTTTCAAAATGTATCAGTTTGGTTATG
AGAGGAAAATTTTACAATTCATAGGAAATGGATGTTCAGTTATGGTTGTATTTTATATAGAAAGATTATT
TTAGTGGAATACATAGCAAATTGGTGAGTTTTTTCAAACTCTTTTAAAAATCACTATTTTCTCAACTCTC
ACAGAGCAGTAAGTAAATCATACAATGTCTTTTGTGGGCCCATTAGGTAGAAAGCCCTACATACACAGTA
GGGAGCATAAAAGAAAGAGCAGTACTTAGTTTTACCCTGGGATTGCTCACTCTGCAAGAGGAGAATGTGC
ACAGATGCAAGTGTATGCTCTCACACTAGCCTGCCCTGGCTCTGCCTTCTTCTGCTCCCAACACACACAC
ACACACACACACACACACACACACACACACACGATATTTACAAGGCAACATTTGATGTGAACATATGCCC
TATTTTAAGAAACATGATATTCCAAAATCTAGACTAAACAAATCAAAGAGATTCAGACAAATTAAAAGGC
AATTAATCACATTACAAATGTTTCTTCACTCTGTAAAAGAATCTCAGTTTTCATTGGTGGGCATTTCATT
TTTGACATATCATTAACCAAGAGAATCTGGGACTGAGGGACTTGGTGATTTTTTTTTTTTTTTGTAAAGC
TATTGCTAATTCAAGCTCTATCAGAAATTGTCTTTGTCCTCAACCTTTAGGAATCCTTTGCACCTAACCC
TTAAACTATATAATTATTAGAGGAAAACATTGGAGATAATCTTCATTATGTTGGATTTGGCAATGTAAGA
AGAACCATAGGAGACATGGAGAGTGTTTAGATTTATTTATTTACATGTCAGGTAAAGACTTGGATTTGGT
TGTGAGGTGAATGTTGACTGATGGATCTTTTGAATTATGTAATTATAAATTTATTCAAAAAGACCTTAAA
AATCAGTCAGTGCAGTGTGTATGTACTCCCTACACCAAACTCCCAAAATATGCATCACAGTTGATTTTTT
AAAAAGCAGCTGACAATAAACAAAATAATTTTTAAAATCTGTTAACAAATAGAAACAAAGGATCAGAATG
CAAAATATAGAAATGACTTGCAAAAATAAATCATAAAGAGGCAAACACTCCGTTATAGAAATGAGCAAGG
AATATAAGCAGGTCATTACTAGAAGATGAAAACTGAATTAATAATAACATTAAAGGCGTTCTTCAGGAAT
GACATCAGCAAGATGGCAGAATAGGAAGTCCTAGACCTTATTTTCCAGTAGAGACATTGACTTAACTACA
GCATACATCCCAAAAAATTATAGTGAGAACTACAGAACCAATTAAGAAGTCACAGTACTGCAGGCAAGCT
CAAAGTCTAGAATAGCCACATTGAAATTGATTAAACAATCTGTTTCATGTCAACTGTGATAGCCCTTTTC
CAGGTCTGGCAGCTTGGTGAGATTGGTAGGAAAAACCCAGCTTGTGGCTTCTCTTCCTTGGGAGGGAAAA
AGAAGAGTGGAATGTGCATCCAACATTCTCACTTTTTAGGAAGCAGACTGAGGAACTGATTTCTGTCTCT
ACTGACCGGGAGCACTGATGAGGAAATCGCATACAGTAATCCCTCCTTATCTATAGGGAATATATTTCAA
GACACCCAGTGGATGTCTGAAACTGTGGATAGTACCAAACCTGATTGCCACCAATCATAACACATTTCTG
TATTCCACTCACAACTTTAATGTCTTTTCCATCGTAACTAAGCACTTATCATATATGATGGCTGTAATTT
TTGCCATGTGAGATGCAACGACAAAACTAACAGAAATTTTTTTCCTTCTTTACAATTTCACAGATAGATG
ATTTGTTTTTACTATAGATCTCAGCAACCTCAGCATATGATTTTTTTCTTTCCTTATTAAGTTGAAAACT
TTCACCTTTTCACTTAAAGAAAGCACTTTACAACTTCTCTGTGGCATATCCAAATTGCCAGCCCCAGTGC
TCTTGGACTTTGAGGTCATTATTAAGTATTAATAAAATAAGAGTTACTTGAACACAAGCACAGTGATACT
GTGACAGTTGATCTGACAACCAGTATGGCTACTAAGTGACTAACGAGCAGGTAGTGTATATATTATGGAT
ACCCTGGGTAAAGGGATGATTCATGTTCCAGATGGGACAGAGTGGGACAGCATGAGATTTCATCATGCTA
CTCAGAACAGTACACAATTTAGGCCAGGTGCGGTGGCACATGCCTTTAATCCCAGCACTTTGGGAGGCTG
AAGTAGGTAGATCACCCGATTTCAGGAGTTCAAGACGAGCCTGGCCAACATGTCAAAACCGCATCTCTAC
TAAAAGTACAAATTAGCTGGGCGTGGTGGCTTATGCCTGTAGTCCCAGCTACTCGGGAGGCTGAGGCAGG
AGAATCACATGAACCTGGGAGGTGGAGGTTGCAGTGAGCTGATATTGCATCACTGCACTCCAGCCTGGGC
AACAGAGCAAGGTGCCATCTCGAACAAAACAGTGCACAATTTAAAACCTTTGAATTATTTCTGGAATTTT
TTCATTTAATATTTTTGGACCACGGGTGACCATGGCTAGCTCAAACTACAAAAAGTAAAACTGCAGATAA
AGGAAGACTACTTTTGATGCCTTGGGGCCATGGAGAACAAAAGAAAGCTTAGTGGTTTGTGGTAGCACCA
GAGAATTGACAGTGCTGCCGATGGAGGCTGGCATAGCTCAACAGAATTGGGAGGAAGCACTTAGCTCATG
ACCTGTTCTTTGGGAGGGGAAGAGAAGCCTCTGGCTTCTCAGGGGCCTACTAGAGGGACTGGTATCTGTC
TTGCCTGACTCACAGCACTGACAGAGAAATGGCGTAGTTTGGAACAAGAGAGCTCAGCAGCTTGTTGCAG
CACTGGAGAATCTGCAATACCACAAACGGACACTAGAGGGGAGGGGAAGATTAGGAGCTCTTGAAAAACC
AGTAAAGCCCTCTAATTTGGAAATCACACGCATAAGCCCAGAGAAGATATATCCCTGGAAAAGGTTTGAG
GGACCTCCAGAATGTCTAGCCGGGTCCACTGGTGAAAGCCTTCCTTTGTACCATGTTAGTCGATAAAGAC
TGAGAGAAGTAGATGTTTCTTTAAATGTACAAAATACAACAAAAATAACAAGACACAAAGTAAACCAGGG
AAACGTGGCATAATCAAGGGATGAAAATAAATCTACAGAAACAGACCCTAAAGAAGCAGAGATCTATGCA
TTACCTGACTAAGTATTTGAAATAATTGCCTTAAGGGATCTCAAGGCACTACAAGAGAACACAGATAAAC
AACTAAATGAAATCAGGAAAACAATATGTGAGCAAAATGAGAATATCAACAAAGAGATGGAAACTAGAAA
AGAACCAAACAGATATTCTGGAGCTAAAGAACCACAATAAGTGAATTGAAAAACTTACTAGAGGGGTTCA
GCAGTAGACTTGATCAAACAGAAGAAAGGGTCAGAAAACTTAAACACAAATCATTTGAAATTATTAAGTC
AGAGAAACAAAAAGAAAAAAGAATGAAGGAAAGTCAAGAAAGCCTAAGACACTTGTGGAACAACATCAAA
TGGAACAATACACACATTTTGTGAGTCCTAGAATAAGAGAGAAAGGGGCAGAGAACTTATTTGAAGAAAT
AATGGTGAAAACTTCCCAAATATTAGGAAGGAATTGGATATCCTAATTTCAGAAGCTCAGCAGACTCCAA
AGAATGAACCCAAAGAGGCCTACAACAACATACACAAAAATCGGATTGTCAGAAGTTAAAGACATAATCT
TGAAAGCAGCAAGAAAAAAGTGACTTGTCATGTACAAGGAAGGTTCCAGAAGATTATCAGTGGATTTCTC
AGCAGAAATATTACAGGCCAGAAAGGAGTGGGATGATACATTCAAAGAGCCAGGGAGGAAACAAAACAAA
ACAAAAAACCCTTCCAATCAAGAATACTGCATCTGGGCTAAATCATCCTTCAAAAAATGAAGAAAAAAAG
ACATTCCCAGATAAACAAAAGCTGAAGGAGTTCATCACCATTAGACCTGCCTTACAAGAATTGCTAAAGG
GAGTCCTTCAAGTTGAAATGAAAGAATATTAGCAACATGAAAGCATGCAAAAATATAAAGCCTTCTGGTA
AATGTAAATATACAGACAAACACAAAATCTTATAATACCGTGTTGTATAGTACAGTTGTCCCTCAGTATC
CAGAGAGGATTGGTTCCAGGACTTCCCACACATACCAAAATCTATAGATGCTCCAGTCCCATAGTAAACT
GTATGGAACTTACAGATACAAACGTTCAATCTTTGGGTTCTACATCCTGCAAATACTATATTTTTGATCC
ATGATTTAGTTGAATCCATGGATACAGAACCCATAGATATAGAGGGCTGAGTGTACATAAATCACTTTTT
AATTCTGGTATAGAACTTAAAAGATAAAAGTGTAAAAATAACTATTAAACTGTGTTGATAGATACAAAAT
AGAAAAGGATGTAATTTGTGATATTGATAACATAAACTGGGGAGGGAAATGTAAATGAGTAGAGTTTTAG
TATGTGATTGAAGTTATCTCGTTAGGTTGTTATAACTCTAAGATGTTTAATGTAATGCCCATGGTAACAA
CAAGAAAATACCTGTAGGAGATGTACAATGGAAAATGAGAAGGAAAGCATGTCACTATGAAAAAAATCAA
TGAAACCCAAAGGAAGGGAATAAGAGAAAATCGTGAACAGAATAACTACTAGGTATATGGAAAACAACAA
AATGGCAATAGTAAGTCCTTCTCTATCAGTAATTACTTTAGGTGAACATGAATTAAACACCCCATTCAAA
AGATGTGGAATAGCAAAATAGATCAGAAAACAAGATCCAACTATATTCTAGCTACAAGAGACTCACTTGA
GATACATAGGCTGAAAATGAAAAGATGGAAAAATGGCAACCAAAATAGAGCAGGCATAGCCATACTTATA
TCAAACTATCAAAAGAGACAAAGAAAAAGATTATATAATAATAAGAGTGTCAATTCAGGGAGATACAACA
ATTACAATAATATATGCACTTAACACAGCATCCAAATATATGAAGCAGATACCAATAGAATTGAAGGGAG
AAAGAGACAGTAACACAATAATAATAGATTTCACCACCCCACTTTTAATAACATATTGATTAACCAGACT
GAAGACCAATAAAAAAATAGAACTTGAATAATGCTGTGGACCAATTGGACCTAATAGGCATATAGAGAAC
ATTCTACCCAATAACAGCAGAATATACACTCTTCTCAAGCACATATAGAACATTCTGTAGGAAAGACCAC
ATGTTAGGCCACAGAACAAGTCTTAACAAATTTAAGAAGACTGAAATCATAGTAACTATTTTTTCTGACC
ACAAGGGAATAGAAATCAGTAACAAAAAGAAAATTGGAAAATTCACAAATATGTGGAAATTAACCCACTC
TTAAACAACCAGTGAGTCAAAGAACAAATTACAAGAAACACAGACAATAACTTGAGACAAATGAAAATGA
AAACCCAACATATCACAACCTATGGGATGCAGCAAAAGCAGTTCTAAGCAGGAAGTTTATAGTGGTAAAT
GCCTACATTAAAAAAGAAGAAAGTGTACATGCTTTTGAAGGAAGAAAAAAAAAGAAAATAAGAAGGATCT
CAAATCAGAAACCTAACTTTACACCTCAAGCAACTAGAAAAAGAACAAACTAAACCTAAAGTTAAAAGGG
AGAGACTAATAAAGATTAGAACAGAAATAAATAAAATAGAGAATAGAAGAAAAAACTAAGAGTTGGGTTT
TTGTAAAGATCAGCAAAATTGACAATTCCTTAGACTAAGAAAAAAAAAGAGAAGACTTAATAGCAAAAAT
CAGGAATAAAGAATAGAAATTAAAACTGATGCCACAAAAATTAAAAAGATTGAGACTACTATGAACAATT
ATATACCAACAAATTGAATAACCTAGAATAAATAAATGTCTAAAAATATACAGCCTACACGACTGAATAA
TGAAGAAATAAAAACATCTGAACAGACCTACAACTAGTAAAGAGATTGAATTGGTTATTCAGAACCTTCC
AACAAAGAAAAAAACCAGGACCAGATGGCTTCACTGGAGAATTCTATCAGACATTTAAAGAAGAATTAAC
ACCAGTCTTTCTTAAAGTCTTCCAAAATATTGAAGAAGAGGGGACATTTCCAAACTCATTTTGTGAGCAA
GCATTACCCTGACACGAAAATCAGGCAATGAAACTACATGAAAACAGATTAATATCCTTCGTGAATCATG
ATGGAAGGATTCTCAGCAAAAAGGGAATTCAACAATACGTTAAAAAGATATGTATAAACACCATGACTGA
ATGAAAATTATTCCTTGAATACAAGGATGGCTCAACATACAAAAATCACTATATTGCACCACATTAATAA
AATGATGAACAAAAACCACATGGATCATCTTAATGCAGAAATGGCATATGACAAAACTCAATACTCACTT
ATGGTAAAACCTTAAACAAATTAGGAATAGAAGGAAATGACCTCAATGTAGTAAAGTAGTAAAGGCCATA
TTTGAAAAATCCATAGCTAACATCATACTCAGTGGTGAAAAAGGGAATGTTTTCCCGCTGAGATCAGGAA
CAAGGCAAGAATATCTTCATCCTCTCTTACCACTTGTATTTAATATAGTATCAGAAGTCCTTGTCAGAGG
AATTGGGCAAGAAAAAGAAATAAAGGTCAACAGATGCTCCAAATTCTTTCCATCCAAATTGGAAAGGAAG
GAATAAAATTGTCTCTGTTCACAGATGACATGATTTTATATGTTAATAATCCTAAAAGATTTCACACAAA
AAAATTGTTAGAACTAATAAACTAATTCAACAAAGTTGCAGTATACAAAATCAACACACAAAACCAGTTG
CATTGCTATACATTAATAAGAACAACCCAAAAAGGAAGTTTAAAAACAATCCTGCTTACAATAGCACCAA
AAAGAATAAAATATTTAGGAATAAGCAACTAAGGAGGTGAAAGATTTGCACAGTGAAAGCTATACATTGC
TAAAAGAAATTAAATAAGACATAAATAAATAAAAAGATATCCCATGTTCATAGATGGGTATGGTTTTTTT
GGGGTTTGTTTGTTTGTTTATTTTTGTTTTGAGATGGAGTTTCGCTCTTGTTGCCCAGGCTGGCATGCGA
TGGCGCAATCTCGGCTCACTTTAACCTCCTCCTCCTGGATTCAAGCGATTCTCCTGCCTCAGCCTCCCGA
GTAGCTGGGATTACAGGTGCACGCCACCATGCCCAGATGATTTTGTATTTTTAGTAGAGATGGGCTTTCT
CCGTGTTGGTCATGCTGGTCTCGAACTCCTGACCTCAGGTGATCCACTTGCCTTGGCCTCCCAAAGTTCT
GGGATTACAGGTGTAAGCCACTGCACCCAGCCTATGCTTAGTATTTTAAATGCCCGTACTACCCAAAGCA
ATCTTCAGGTTCCAGTGTTATTTCTATCAAAATGTCAGTGGCGTTTGGTTTTTCTTTTATTTTTTACAGA
AATAGAAAAAGAATCCTTTAATGTATATAGAATCTCAAAGTACCCCAAGTAACCAAAACAATTTTGAGAA
AGAAAAACAAGGTGGAAGCCTCATACTTCCTTTTTTCAAAGCATATTACAAAGCCACAGTAATCAAAACA
GTGTGGTACTGGCATAAAGGCAGACATATTGACCATTAAAACAGAATAGAGAGCCCAGAAGTAAGGCTTC
ACATGGAAGATCAAATGGTCTTTGACAAGGGTATCCTGTCTATAAGATTGGGAAAAGATTGTCTCTTCAA
TAATTGGTGTTGGGAAAACTGGATATACACATTGAGAAAACAAATTTGAACCCTTACCTTTCATTATATA
TAAAAACTAACTCAAAATAGATGAAAGACCTAAACGTAAGACCTGAAACTGTAGGAGAAAAGTGTCATGG
CATTGGACTTCGCAATGATCTTGGATATGACACCAAAAGCACAGGCAAGAAAAGCAAGAATAGACAAATA
GGACTGCATGAAATTTTTAAGTGTCTGTGCAACAAAGGAAGCAATCAACAGATTAAAAAGCAGCCTATGT
AATGGGAGAAAATATTTTCAAACCTTAAATCTGGATAAGTGATTAATATCCAGAATATACAGAGAATTCC
TGCAACTCAACAACAGCAAAATAATCCAGTTTAAAAATAGGTCAAAGACTTGAATAGACATTTCTCCAAA
GAATATATACAAATGACCAACAAGCATATGAAAAGATGCCCAACATCACCAGTTATCAGGGACATGATAA
TCAGAACCATAATAAGATACCAGTTCACACCTATTAGAATGGCCACTATCAAAAGAAGAAAGAGAAAATG
ACAAATATTGATGAGGATGTGGAGTACTTGGAACCCTTGTACACTGTTGCTAGGAATGTTAAACTAGTGC
AGTCACTATGGAAAACAGTATGGAGTTTCCTTAAAAAATTAAAAATAGAATTACCAAATGATCCAGCAAT
CCCATATTTGTGTATATTTCCAAATAATTGGGAACAAAATCTCTAAGAGATATTTGCACACCCATGTTCA
TTGAGCATTATTTACAAGAGCCAAGAGGTGGAAGTAACCTATGTGTCCATCAGCGGACGAATGAATAAAG
AAAATATGGTATATATACACATTGGAAGATTATTCCACCTTAGAAAAGAAGGAAGTCCTGTCATATGCTA
CAGTGTGGATGAAACTTAAGGACATTATGCAAAGTGAAGTAAACTAGTGACAGAAGGCAAATACTGCATG
ATTACTTACACTTATGTGTGGTATCTAAATTAGTCAAACTTGTAGAAACAGAAGCTAAGGGCAGGTGCAG
TGGCTCACACCTGTAATCCCAGCACATTGGGAGGCCAAGGCAGGCGGATCACCGGAGGTCAGGAGTTTGA
GACCAGCCTGGCCAACACGGCGAAACTCCATCTCTACTAAAAATACAAAAATTAGATGGGTGTGGTGGCG
GGTGCCTGTAATCCTGGCTACCCAGGAGGCTGAGGCAGGAGAATCGCTTGAACCTGGGAAGCGGAGGTTG
CAGTGAGCTGAGATCGTGCCATTGCACTCCAGCCTGGGTGACAGAGCAAGATTATGTCTCAAAAAAAAAA
AAAAAAAGAAAAGAAAAGAAGCAGAAAGTAGAATAGTGGTTACCTTGGGATGGGAGGAAGAGGGAAATGG
GAGTTGTTGTTCAATGGGTATAGAGTTTTGGTTTTGCAAGATATGAAAGTTTTAGAGATCTGTTGCATAT
AAGGACATATAGTTAACACTACTGTACTGTATAGTTAAAAATGGTTAAAATGGTAAATTGTATGTTAATG
TGTTTTTCACCACAATTTAAAACTGGTCTATGAGCTTTTCTGTGCATTTTCAGGAAAGTGTAAACTAACA
ACATCAGTTAGACATCCATTAGGTTATGGTGAGCTTTAGGAGGTTGCTGATGGGAACATAAATAGGCACA
ACCACTTTGCAGAACAATTTGGTCTTCCTGGAATTTGGGATTCCTTGTTAGTCTCTCGATGAGTGCTCTG
TTTACTGTAGCCTCCAATAATTATGGGAAGATCAAGAGGTAGTGTTGATTGAGGTTGCCAGTAAATTGTA
TTCTGGGCCTTAGAGGACTCCCATATTTCCTGGAGGTTGATAGCCATTTCGGGCTGGCTTCTCCTTCCAG
GCCTCCTTCCTCCTTCCTCCTTCCTGTTGGAGTCAGGACATTTCTGTTATCTCTTGCCTAAAGACAGTGG
ATAAGAAGAAAGAGTGTATAATGTATAAGGCCTTGGCAGCTGGCTGTCAGGTTGCCCCCTGTTCCTTGAA
TTCATCCCCAAAGTAACTCTTATCTTTTATAGTAGTCCTCTCTTGGCAAGCTTTTAGGGCTGTGGTATTT
TCCTTCAAAAAGATCCCACCTACCTACCATCAAGCTTTTCTCAGAATTCATGGGTCACCAAAAGCCCCCA
TTTTACAGTATTATATATTTAATTGTAAAAACTCTTCCATCATTGACATGATTGTATATTTAGAAAACCC
CATTGTCTCAGCCCAAAATCTCTTTAAGCTGATAAGCAACTTCAGCAAAGTCTCAGGATACAAAATCAGT
GTGCAAAAATCACAAGCATTCCTATACACCAATAACAGACAAACAGAGAGCCAAATCATGAGTGAACTCC
CACTCACAATTGCTACAAAGAGAATAAAATACCTAGGAATACAACTTACAAAGGATGTGAAGGACCTCTT
CAAGGAGAACTACAAACCACTGCTCAAGGAAATAAAAGAAGACACAAACAAACGGAAGAACATTCCATGC
TCATGGATAGGAAGAATCAATATCATCAAAATGGCCATACTGCCCAAGGTAATTTATAGATTCAATGCCA
TCCCCATCAAGCTACCAATGACTTTCTTCACAGAATTGGAAAAAACTACTTTGAAGTTCATGTGGAACCA
AAAAAGAGCCCACATTGCCAAGACAATCCTAAGCAAAAAGAACAAAGCTGGAGGCATCATGCTACCTGAC
TTCAAACTGTACTACAAGTCTGTAGTAACCAAAACAGCATGGTACTGGTACCAAAACAGAGATATAGACC
AATGGAACAGAACAGAGGCCTCAGAAATAACACCACACATCTACAGCCATCCAATCTTTGACAAACCTGA
CAAAAGCAAGAAATGGGGAAAGGATTCCCTATTTAATAAATGGTGCTGGGAAAACTGGCTAGCCATATGT
AGAAAGCTGAAACTGGATCCCTTCCTTACACCTTATATAAAAATTAATTCAAGATGGATTAAAGACTTAA
ATGTTAGACCTAAAACCATAAAAATCCTAGAAGAAAATCTAGGCAATACCATTCAGGACCTAGTCATGGA
CAAGGACTTCATGACTAAAACACCAAAAGCAATGGCAGCAAAAGCCAAAATAGACAAATGGGATCTAATT
AAACTAAAGAGCTTCTGCACAGCAAAAGAAACTACCATCAGAGTGAACAGGCAACCTACAGAATGGGAGA
AAATTTTTGCAATCTAGCCATCTGACAAAGGGCTAATATCCAGAATCTACAAAGAACTTAAACAAATTTA
CAAGAAGAAAACAAACAACCCCATCAAAAATTGGGCAAAAAATATGAACAGACACTCTCAAGACATTTAT
GCAGCCAACAGACACATGGAAAAATGCTCATCATCACTGGTCATGAGAGAAATGCAAATCAAAACCACAA
TGAGATACCATCTCACACCAGTTAGAATGGCGATCATTAAAAAGTCAGGAAACAACAGGTGCTGGAGAGG
ATGTGGAGAAATAGGAATGCTTTTGCACTGTTGATGGGAGTGTAAACTAGTTCAACCATTGTGGAAGACA
GTGTGGCGATTCCTCAAGCATCTAGAACTAGAAATACCATTTGATCCAGCTATCCCATTACTGGGTATAT
ACCCAAAGGATTATAAATCATGCTTCTATAAAGATACATGCACACGTATGTTTATTGCGGCACTATTCAC
AATAGCAAAGACTTGGAATGAACCTAAATGTCCATCAATGATAGACTGGATTAAGAAAATGTGGCACAAA
TACACCATGGAATGCTATGCAGCCATAAAAAAGGATGAGTTCATGTCCTTTGCATGGACATGGATGTAGC
TGGAAACCATCATTCTGAGCAAACTCTCACAAGGACAGAAAACCAAACACCACATGTTCTCACTCACAGG
TAGGAATTGAACAATGAGAACACTTGGACACAGGGTGGGGAACATCACACCCTGGGGCTTGTTGTGGAGT
GGGGGGCAAGGGGAGGGATAGCATTAGGAGAAATACCCAATGTAAATGATGAGGTAATGGGTGCAGCAAA
CCAACATGGCACGTGTATACCTATGTAACAAACCTGCACGTTGTGCATGTGTACCCTAGAACTTGAAGTA
TAATTAAAAAAAAAAAGGTCAAAAAAAATTCTTCCATCATTTCTAGCAGTTGGGAGTATAGCATGAATGC
TAGGACATCCGTGTCCTTAGTTCATTGCTTGATGCAGTCTCTTAGGTTACATTTTCATCTTATTTTCTCT
TGACTAGATTAAGAGAGTCACCATTCTTCATAGGTCTTGCCTTTGAGTCCTCAGGATGTGTAGCAGTTCT
ACACCAGAGCTACTCAAAGTGTGGCCCTACCAATCAGCAGCATCAACATCCCTCGGGCAGAGACCAAGAA
ATATGACTTTTTAAAAACATCTGTCCAGACATACTCTCTGGAAGTTCAAGAAATGCTGCTCTACACTACT
TCTTTAGAAGCAGTTCCCATAACTGCATATCAATCCCTGGTAACAATCTGAATACTTTATGGTGACATGA
TAGAATTTTATTTACGGTTTTTATTTTTGTTGATGAATTCCTATAAATTGTTAATATTTTTGCTGTATTC
TTGATAATAGTAAATTCTCATAAAGATAATTTTTTGCCAAGCTACCCATAGTGATCTATTATGTGTGAAC
AGTTTGTCTTTTCTCCTCAAATATTCACCTTTTCTAAATTGTTCTTCCTGTTCTCTACCGCTTCTTAAGT
GGCAGATATCCTTTCAACATTTACCTTCCATAGTGCTTTATCATCGTTCTCTTACCACCAAGATGGTTTT
AGATCTAAAATTAATTAATATGCTTTTTGAGTCTATCATCTAAGTTGTTAACAAAAAGACACATTTAGCA
TGAGTTGTAAATATCTTAAATTTTTGGAATATATGAGCTTAGTGGGTGGGCTGGTAGAGGAAGAGGTATG
TGGGGGTGTGTGTGAAGGTGTATACTTTGCACATAGCCTAGCAGAATATATTGCATAGAGTTAGGGCGGG
ATGGATGTTTGTGCAATTGAAAGGTAGGCCGGAGAGTTGCCTGTGTGCATCACTCATGTAGCGTCTCAAA
TAGGCAGGCAGGTCTCCAGCCTGACTCATCAATCTTCCTCCCTAAAAGATCTCTAAGCGCAACTTTTCTC
TCATCTGAAAAGAGGAAATGAGAAGAGTCAGAGATTATTACTGGGGACTGAGTGGGTGGAAAGACTGTGG
TTCTGGGGACATTTATCAAGTATTGCAGTTCATGGCTGCAGATTATATCTTCTGTTTAGGCTGGAAATGA
TCCAGGATAATTTTCCTGAAAAATTTAAAAAATCTCATAAAGACAGGTAGTTCTTGGGTATACCAAAATT
TGGGCAGGCCAACTGATAACCTTCCCAAGAACTTCAAGGTGCACGCAGCCTTCATGGCTCCTCTTTTGGT
CTGAAGTTTGTCAGAGTGTGGAGATCCAAGTTCAAGTGGAGAGTTACGCAACACTTTCCAGATTGAATTA
CACTAAGCATTAGGTCTTGACTGGTTGCCAGAGCAGCACTTCCAAATAATTTCTGCACAAGAATTCAACT
GCAGAAGGCTAGACGGTAACCATGTACTGCTGGGAACATCCTTTCTGTGTGGTTGTATTGTAGCTTCCAA
ACCATCTGCCCCAAACCATAGAGCTACAGGATAAGCTGACGATGCTCAGAATGTTGCTCCTTCTAGATGG
TTTGTAGCAAAGAATAGGATAGAATTTAAACATTCTGTCACTGAATTGTTGACTTTACTTGGTGGCAAGT
GAAACTCTATTTAAAGCCCTATGACAACACCATTTATCAGGCCTCTAAAAATAATGCAAAAAGAAAGTAA
GCTAATTTTCCCACTTTTTTTGTTCCTCTGGCGATCTGTGCATCTGAAATTATGAGATCAATTTCTATAT
TTTCTGAGACTTTTTGAATCTTTGGAAATGAACTTTAGACACTGAAGTGCTAAAAAATTAGAAAAAATAA
ATGCATAGATGCCTTCTAGAAGGAAAAAAAAACACAGGAAAACAGCATAGCATTGTTTATATGGTGCTTA
AGTTTGGGAGCTCTTGGCTGCTTCGACATTTGAAGTCATACTTGTGAAAGGAGAGGAATTAGAAACTTAG
ATTCATAGGTGGATGGGACTCTCCTGACTTTAAGCATATACTGGAAAGTAGTTTGCCTGTTATGCTGTGT
TCTGATTTAATTGTTTCAATTTGTAAATCTTAAAAGTGGACAGAGAACTTCAGATATGTAGTAGAAAGTT
ATGTGGTATTATGATACCTATTTTAATTGTTATTATTAATGACAGCAAAAATTATGATGGCTGCAGCGTG
GTTGACAGCTGTTTTGCAAAGGTTATCATGGTGTCAGAGATGTTACCTGATTTCATTAAACCGGCTTCTA
CTTGAGATAGAAGAATACACTTGGCAGAATTTATAATTCACTGGAGAACTGTGGACTTGAAAAGTTTTGT
TCTCACACAAGCTTTTAAGAATCCAAGTTAAAATTTTATGAATGGTGATCACAAAAGCTTCTAAAAGGGC
TCAAAAAGCATGTTACGCATCAAATTGCTTTTTAAATTCAATCTTCTGATAGGTATAAATGAACTCAGTC
CAAGAGATTGAATTATCTTAAAAACTATATATAAGGGCTCAACACATTCAGAAAAGTACCTGGACAAATT
TATCTGGTTGAATTATAAAATTCTTTAAAGAAAAGATTCTAAACATCATTCAGTAGAGCAAATTAGGAAT
GTATCGGATGTGTTGGTTTACAGGGAGCACTCTGCTAGCACAGGCATCTCATATTCTTAGTAAATTCAGT
TAAGAATTTTACTGATTGTATCATAGCTTTGCTTTGACTAGGAATATCCTGAACTGCTAACTAAATTAAT
TCCAATTTTATCCTTGCTACTCCTGCCAGCTGGGATGCCAGCATGGACATCCTTCAGTGGACTTCGCTCT
GTGCCAGGGAATTTGTTCATATTACTTTTGAAAAACAAGCATTCTTAACAACAACAACAACACCAAAAAC
CAATTATAAACTAGAGAATAAACCTCTTCCAAAGTGGCACAATCTGGCACAAAGGCAAATTTTTAATCTA
TAAAAGTTGTTTCAGCCTTGGCACAGTGGCTCACTCCTGTAATCCCAGCAATTTGGGAGGCCAGGGTGGG
AGGATTGCTTGAACCCAGGAGTTTGAGACCAGCCTGGGCAACATGGAGAAACCCCATATCTACAAAAAAA
AAAAAAACCCAAAAAAAGCCAGATGTGGTGGCAAGCACCTGTAATCCCAGCTACTAGGGAGGCTGAGGTG
GGAGCATCGCTTGAGCCTGGGGAGGTTGAGGTTGCAGTGAGCCAAGACTGCACCACTGCACTCTAGCCTG
GGTGACAGAGCAAGACCCTGTCTCAAAAAGAAAGAAAGAGAAAAGAAGATTGTTTCAGCTGATACCATCC
AGCAGAGTCTTTTAATTGTGGTCCAGGAGACTTTAAAAACCTCTGTGAACTGCTTGTCTTCTGTCCAAGG
GTGAGAAAATGAAAAGCACAAATAATTCTATAGAAATACCCTGAAAAGAGACCAGTAGAATCAAATAATG
GGAAGAGTGCAAAAAAAGATGTAAATAAAGGGGAAAAAATACTCCAGAGGGAAATAAATACTAAGCAATT
TAAGACTGATTAAGGATGATTAGTTTTTAATGAGCTACTTTTGCTGTTTTGGAAATAAGAACCTGAGGCA
GGAAGTAACTCCTTTATTACGAATATTTTCTTTTTCCTCCCTCCCTCCCTCCCTCCCTCCCTCCCTTCCT
CCCTTCCTTCCTCCCCTCCCCTCCCCTCCCCTCCTCTCCCCTTCCGTCCCCTTCCTTCCCCTCCCCTTTC
CTCCCCTCCCCTCCCCTCCCCTCCCCTCTCTCTTTTCTCTCGCTCTCTCTTTCCTTTCTTTTTTTGACAG
GGTCTCACTTTGTTGCCCAGGCCAGAGTGCAGTGGCATGATCTCAGCTCACCCCAACCTCCACCTCCTGG
ACTCAAGCCATCCTCCCACCTCAGCCTCCCGAGTGGCTGGGACTACAGGCGTGTGCCACCACACCCAGCT
AATTTTTGTATTTTTTTGTAGAGGCAGGGTTTCACCATGTTGCCCAGGCTTATCTCAAACTCCTGGGCTG
AAGCAGTCCACCCACCTTAACCTCCCAAAGTTCTGGGATTGCAGACATAAGCTACCACACCTAGCATGAA
TATTTTCATTTTCAGTATTTTACTAGTTAACATTGTATTTTAGTTTTTTAAAAGTTTTATTATAAAACAC
TTATGTCATGGAAAAACTGTGTGCCTGTTGCCCAGGTTTTATAGTGCTAACATTTTATTTATATTTGATA
TTTTTAAGAAAAAGTTTCAATTAGAGCTGAAGCATCCTTCTCCTATTCCATTTCTTTATTCTCCCCGCTG
GAGCAAGCACGCCCAAGAAGTGGGGTGTAGATTCTTCCTGCCATGTTTTAACACTTTTACTTCACATTTC
GCTGTGCTTTAAAACTTTACATAAGGATGGTGTATTGTGGATATCTTTATGCAACTTGCTTTCTTCATTC
ATTCAACTTTTGAGATTTATGTATGCAGATAATGTAGGTACAGTTTATTCATTTAAACTGCCATATAGCA
TTCCATTCTGTAAATAAATAATCATTTATTCATTTCTGTACAAATTCACAGCAAGATTGAATCTACCTTT
TACAAACAGTCCTGTTTGTCTCCCTAACCTGTAAGAAGAAATGGTAGCACGTTGCTACCAGTTGTTCTCC
AAAGTGTTTGTGCTTATTTATTTATGTTCCTATCAGAAACATCCTGGAGTTCTCTTTTCTCTGTAATCTG
ATGGATTTCCCACTACAATTTTTTTTTTTTTTTTTTTTTTTTTTGAGACGGAGTCTTGCTCTGTCACCCT
GGCTGGAATGCAGTGGCGTGATGTCAGCTCACTGCAATCTCCACCTCCTGGATTCAAGCAATTCTCCTGT
CTCAGCCTCCTGAGTAGCTGGGACTACAGGTGCCCACCACCATGCCTGGCTAATTTTTGTATTTTTAGTA
GAGATGGGGTTTCACCATATTGATCAGGCTGGTCTCGTACTCCTGACCTCAGGTGATCTGCCCTCCTCGG
CCTCCCAAAGTGCTGGGATTACAGGCATGAGCCACCACACCCAGCCCTCCCACTACAAATTTGATGTTAT
AGTTTGTATTGAACAACAAACAACACATTGAAGTACTAAAGAATTAATTAGGGTTGAAAGTAATTTCTGG
ACATCAGAAAATGGGGATAGGAATGCCCTTTCAAAAGCTACTATTTTGATTAACTTTGAATAACTATTTG
ACCATTTCAAGTAGTTACATCAAAGAAATAAACAGACAACCAACAGAGTGGGAGAAAATATTGCAAACTA
TGCATCTGACAAAGGACTAGTATTCAGAATCTACAAGGAACTCAAATCAAGAAAAAAGCAATCCCATCAA
ACAGTGGGCAAAGGATATGATAGATATTTCTCAAAAGAAGATGTACAAATGGCCAAGCATATGAAAAAAT
GCTCAACATCACGAATCATCAGGGAAATGCAAATTAAAACCACAATGAGATACCACCTTACTCCTGCAAG
AATGGCCTTTTAGATGTTGGCATGGATGTGGGGAAAAGAGAACACTTATACCTGCTGGTGGGAATATAAA
TTAGTGCAACCTCTATGGAAAACAGTATGGAGATTCCTCAAAAAGCTAAAAGTAGATCTATTTGATCCAG
CAATTACACTACTGGCTATCTACCCAAAGGAAAAGATGTCTTTATATAAAAAAAAAACCACTTGCATATG
TATTTTTATAGCATCACAGTTAACAATTGCAAAGATGTGGAACCAACATAAGTGCCCATCCACCAATCAG
TGGATAAAGAAAATATGGTATATATACACTACTCAGCCATTAAAAGGAACAAAATAATATTTGCAGCAAC
TTGAATGGAGCTGGAGGCCATTATTTTAAGTGAAGTAACACAGGAGTGGAAAATCACAAACTGTTATGTT
CTCACTTATTAGTGGGAGCTAAGCTATGAGTACACAGAGACATACAACAAGCTTGTCGAACCTGTGGCCC
ATGGGCTACATGCAGCCCAGGACAGCTTTGAATGCTGCCCAACACAAATCTGTAAACTTGCTTAAAACAT
AGTTTTTTTGCGATTTTTTTTAAGCTCATCAACTATCGTTGGTATTAGTGTATTTAGTGTGTAACCCAAG
ACGATTCTTCTTTTTCCAAAAAGAAGGAAGCCAAAAAGATTGGACATCGCTGGCATACAGAGTGACATAA
TGGACTTCAGAGACTCAGAAGGGGGAGGAGAGTGGGATGGGGGGTAGTGAAAAAAACTACACATTAGGTG
CAGTCTACTCGGGTGATGGATGCATTAAAATCTCAGAATTTACCACTATACAATTCATCCATGTAACAAA
AAACTACTTTTACCCACAAGCTATTAAAATAAAAATTTTAAAGTAAATAGTCTAAACAAAAAATATAGTT
GCATTTATTAATTTCATAAAAATGAAAACTAAATTTTTACAAAAAGAATATGCAGGCCCCTACAGTGATC
TACAGAAGCCTTTCCGCCATCCTCCCCGGTTCACTGGGTGTGGCCACGTTGGTCCCCTTGCTATTTTCAG
ATGCTGAGGGCCTTTGCTTTTGCTTTTCATCTGTCTGCAATGTTTTCTTCCCAGATATATACGTGCTTGT
TCATGTACTTCCTTCAGAGCTCTGCTCACATATCACCTTCTTGGTAAATTTCTGTCACTTCTGAGTATTC
TTTACTTTTCAGCATGACACTCAGTATCATCTGGCATTATATTGTTCCTCTCCCTGATGAGACATTGTCA
TCTTTGCATCTGTGTCATGTACACCTCAAACAGAGCCTTGACTACAGTAGGGGATCAATAAATAGGTATT
AAATGAACAAATAGGACAAAGATACACAAATATATAAACAAATTCTCTGAAGAGGAAATACAAGTGGGTA
ACAATTACTGTCTCACAAGTTATCAGGAAAATGCAAATTAAGGCAAAGAAATAGCAATTTTTGTCCGTTA
AATTTGCAAGAAATAGAAACAAATAATGATATAATTGGAAAGGGTGGAAAAGTAAATTGGTGTGGTCTTT
TGCAAGGCAGTTTTTTTTTGTTTTGTTTTTTGTTTTTTGTTTTTTTTTTTTTGAGACAGGTCTCGCTCTT
GTCTCCCAGGCTGGAGTGCAGTGGTATGAACACAGCTCACTGCAGCCTTGACCTCTTGGGCTCAAGCAAC
CCTCCCACCTCCGCCCCCCCGAGTAGCTGCAACGCAGGCGTAAGCCACCACACCTGGCTAATTTTTGTAT
TTTTTGTAGAGTTGGGGTTTCTCCATGTTACCTGTGCTGGTCTTAAACTTCTGGGATCAAGCGATCTGCC
TGCCTCAGCCTTTCAAAGTGCTGGGTCTCCATGTGTGAGCCACCACCCCTGGCCTTGGAAGGCAATTCAG
TATGCAAATACTCACACATGGGCACAGACAGGCATGGGCAAGGGTAGCACCACAGCCCTGTCTGAATAGT
GAAAAACCAGAAACAGCCTCAGTGCCTACTGATAGTGGCATTGTTAAATTACAGAACATGTTTGTTTTAA
TAATAGGCAGCAAGTTTTTAAGAATGAGGAACAGCTACATGCTCTATACTGTGGTTTCATTTGTGTTTCA
CAAAACACAAGACTAAATTTCTATATTTACAATTACATATGAAAATACCTAGAATAGCCTCCACCCAGAA
CTTTCATTTTATTTATCATTCACTGGAGACGGATTTGTTGAGCACGTGCTGTGTGTGAGGAGTTATCCCT
AGGTGCTAGGAATAGAGCGGTGGGCAAAGTAGGAGAAGCTGCCTGCCATTGTAGAGCTTCTGCCCTCAGA
GGAGGAAGCGAACCATGAGTACTATAAGGGAATACTGTGTAGGTCAGGTGGTGAAAGGTACCAGGAAGAG
AAGTAAAGCACGGGTAAGAGGGCACTTGAAGCTCGAGTGTCCAGTGGCGCTTTCTGCAGTCCCAGGCACA
TCCTGTAAATGTGCACTGTTCGGTACTGTAGCCGCCAGCCACCTATAGCTGTTGAGCACTTGAACTGTGA
CTAGTGCAGTTGAGGAGCTGGATTTTTAATTTTATTTCATTTTAATTCATTTGCATTTAAATTGCCACAC
ATGGTAGACAGTATAGTGACATGGGATGATCAGAGAAGACCTCACTTAACAAAGGGACATTTGAGCTGCA
ACCAGGGAGCTAATCATGTATTTCAGGCAGAGTGAACAGCAGGACTTTATTTGGGGCAGTCAGAGGCAGA
AAAGACAAAGGTAAGAGTGGAAGGAGATTAAGTCAGTGAAACAGATGGGGACCCACCATGGAAGGACTTG
CTGGCTAGTGAAAGACATTGCTTATTCTCTACATGAGGTGAGAAGCCATTGCAAAGCTTTGAGCAGACAA
GTGTTGTGATCGGAATTTTTAAAGGGGTGCTGGAACTGTTCTGATGTTAAACTATAGGAGTGAGTGCAGA
AACAAGAAATCCAGAGGCTACTCTGTCACCCAGGCTAGAGGTGGTGGTGAGTTACTCTCCACTTAGGAGG
ACAGTGATGGAGGTGTTCAGAAGAGGTCAGATGTGTTGCTAGTATTCACTGATGGATCAGATGAGGGGCC
TGAGAGAAAGGGAGGAATCAGGATTTGGGCCTGAGCAAACAAGATAGCACTGGGGAAAGGGAACACTGGG
AAGGGAATTCAGGAGTTGTGTTTTGGACATATTAAGTGCCTGTGAATATAAAGAACAAAGTCCTGACCAT
GAATGACACTGAAACAGCAATGGTAGCTAAAAGATTTCTTCCTAAAGAATTGGATAAAAGAGAAGTGTTC
ATCGATGGTGTTAGAGTCATTCTCTTTATTTAGAGGCAAAACAGGTGATCTGTCTTTGACCTTTTTAGCA
TGAAGGTTTTTATATGTCCTTAATTATGCATGGCTCTTAGATTTGAGTGATTATTTCTTATTTCTTCCAT
AGAATGGCTCCCGAGCGAGTGGCGTCCCTGTCACGAGTTTGTGTCCCACTTATTACCCTGACAGATGTTG
ACCCCCTGGTGGAGGCTCTCCTCATCTGTCATGGACGTGAACCTCAGGAAATCCTCCAGCCAGAGTTCTT
TGAGGCTGTAAACGAGGCCATTTTGCTGTAAGTGGCAAATGTTTCCTGTCATCCTGCGTCGTTTTTCCTT
TTCTTAGAAGGCTGTGGTGTGTTGGAAAGACTGTACGACAGCAGTGTCCAAACGTTTTTGTCTCAGTACC
CTTTATACTCTTAAAAATTACTGAGTATCCCGGCCAGGTGTGGTGGCTCACACCTGTAATCCCAGCACTT
TGGGAGGCCAAGGCGGGTGGATCACCTGAGGTCAGGAGTTTGAGACCAGCCTGGCCAACATGGTGAAACC
CTGTCTCTACTAAAAATGCAAAAATTAGTCAAGCATGGTGGTGTGTGCCTCTAATCCCAGCTACTAGGGG
GGCTGAGTCAGGAGGATCGCTTCCACCTGGGAGGCGGAGATTGCAGTGAGCCGAGATTGTGCCACTGCAC
TCCAGCCTGGGCAACAGAGCGAGACTCCATCTCAAAAAAAAAAAAAATTACTGAGGATCCCAAAACATTT
TATTTTTTTATTTTTAACTTTTATTTTAGGTTTGGGGGTACATGTGAAGGTTTGTTACATAGGTAAACAC
ATGTCATAGGGTTTTGTTGTACATATTATTTCATCACCCAGGTATTAAGCTCAGTCCCCAGTAGTTACCT
TTTCTGCTCCTCTCCCTCCTACCGTTGCTCAGGTAGGCCCCAGCGACTATTGTTTCCTTCTTTGTGTTCA
TACATTCCCAAGAGTTTTAAAAATCTGTTAAACCCTTATTAATATTTATCATATTTGAAACTAAATTTTT
AAAAATGTGTTTGTTACTTAAAAAATAAAAATAATTTTATTACACGTTAACACAAATAGCTTATTTTTAT
GAAAAGCAATGCTCTTTTCCAAGGCAAAAAAAAAAATGTTTGACAAAAGCAGCATTGTTTTTACATTTTT
GCAAGTCTCATTTTCTACCCTAAGACTGCTGAATTCTCATATCTGCTTCTGGTGGGACGTGTTGTTTTGG
TTGAAGTGTATGAAGAAAATCCAGCCCCACATAGATAGTAATTGGGAAAGGCGGGAATATTCTAGTAGCC
ATTGCAGATCATTGTGGATAATTCTGCTTTGATAGCTCACCAAAATTTGAAAATGGTCATTTTTTAAAGG
GTAGTTGCAATGTGGAATCTGAAATTATGTCAGTTAACTTTCCATACTCTGTTACATTAGAAACCCATTG
GTCTGTCTTGCACTTTCAATGGATCTTTTTTGCCAACACACATAATTTTGTAGCATTATGCATGGTTCAT
TTGGAAAATCTTCATTCATTGAGTTATGTATATCTTCCAAACATTGACATATTTCATATGCAGTATCAAA
ACCTATAGTCATTACTGCCACCATGGAGCTCATCAGAAATGACTTTAAGTATTGGGAAGCTGTCAAGCTT
ATGTTGGTGGACATAGATTTTCCAAGATTCTAATTTCTGCTTAAAAGCTAAAATTTATCATGGGCTACAA
ACACTGTCAGTCATTTTCCTTAGGGGACTGAGTCACTTTGCTAATTATTGAGAAAGTATGTGCCTAATCC
TAAAATGTGACTGACCACTGCCTGTCTGCTAGTCATTCTTTCAGGTCAATTTCCATGACAAAAAGTGGTC
AAGTGAGCCCACTGCTGAAAGAGTTGTGCAGGTGTACAAGTGGAGTGCTTTTCTCCAGGCAACCGTCTTT
TTTTGTTATGAAGCAGAAGTGCTTTATGCACACTTTCCTTTTCACCGTACAGAATTCTTTTTTAAAAGTA
TCCTTGAGGGCAACAGTTTAATAAAGTCAGTATGTTAAACTGCTTCATCAGACATTCATATGTGAAAATG
CAGTGTTTCGACTGTGTGTGTGTGGTGGTGAAGAGTAGCGTGAGGGCTGTCTCGGCTCTGATTCCCACTG
AGACACAGCTGTGTTACCCACTGTTGCTTTTGCGCTATCAGTGCAAATGTCAACACGGTTATTCCAGGAA
AAACCAGGAGATTCAAAATAGTTATTCAGTACTTTAAGTATTTCCCTACCACTTGGGTGTGTGGCCAACT
TTCATATAAAAGAGCTTCTGTGCTTAAGTTGGTGCTGATACCAGACAAGTACAAGCAATACAGTAAGTCC
AGAGATTCTATTGTAAGGCAGAAGTACAGTTCTCTTGGTGACATATTAATTTATCACATCTGCATTTAAA
TTTTTTTTCTTCAGACTCTGAATGATTGGTCTCAAACTGATGTGGCAGTTAACTTGCACCATAACAGTAT
TCAAAATATTGTTGCATAAGACACAATAAGGTAAATCATTAACATCTGTAAAGGCAAGGGAAAAATAACT
TTCCTCACATTTTTTGTCTTTATTTACAGTTTAGCCCACTTTCTCTGTAGCAGATGTCTCCATCTCATGA
GTCAGAGAATTCTCTGATGTGTCAGTTTCATCTTTTCTTTTCTTTTCTTTTTTGAGACAGAGTTTCACTC
TTGTTGCCCAGGCTGGAGTACAGTGGTGCAATCTCGGCTCACCGCAACCTCTGCCTTCCGGGTTCAAGTG
ATTCTCCTGCCTCAGCCTCCCGAGTAGCTGGGATTACAGGCATGCACCATCACGCCCAGCTAATTTTGTG
TTTTTAGTAGAGACAGGGTTTTCCATGTTGGTCAGGCTGGTCTCGAAATCCCGACCTCAGGTGATCCACC
CACCTCGGCCTCCCAAAGTGCTGGGATTACAGGCGTGAGCCACTGCGCCAGCCAGTTTCATCTTTTCTTG
ATGAAACATCTGTAGGATGAGAAATTGAATCTTTTAATCCTCATTTTTAAAGCCAGTGATCCATTCTTAA
ATGCAAGAAAATACATCATAAATAAATGTTACTTTTCAAATAGAATATTGTAAAATTCCAAAATAATAAT
CTAAAATATATATTAAAATATATAAGTAAAATATACACTGTATATATACATACAAATATATATCTAATAA
AATTATCTAAAATAACTTAGATAAAATTTAAAAATTAGAAAAGTTTTCAAAATTAAAAAATATATATTAC
TACAAAACCCAACAAAGTGTACTTATTTCTTCTTATGTTTCCACGTAGGCCCAAGAAAAATGTAAGAATT
TTTTAAATAATGATTTTTTCTTTTAACGCATCTCAGTTCTTCCCTCCCTCTCTGGAAACAGTTCTTTGAA
CCCCACTTTGAAAATTGTTGCATGGCCTCTGACTACTGCTGTAGTCATGACTCCAAGTTACGAGTGGCTC
TGTCTGCAGTGTTTGAAAACACTGTGAATCCACTGTGTGGTATAATTTGCAGAGCCCTCTCCGTCTCAGA
TAATGAGATCCAAAGCATTCACATTTCCGAATTCAAGGTATACATGCAATGTGATTTTAAAATGATACTT
ACTGCTTATAAACTTGACATTTTGTTAAGAATACTGTGGTTTTTAAATCATTTTATTAATACTATTTACG
TTTTCAATTTTTTTTTTTTTTTTTTTTTTTTTGAGATGGGGTCTCACTCTGTCACATAGGCTGGAGTGCA
GTGGTGCAGTCTTGGCTCACTGTAGTCTCAAACTCCCAGGCTCAGGCGATCCTCCCACCTCAGCCTCCTG
AGTAGCTGGGACCACAGGTGTGTGCTACCATGCCTGGCTAATTTTTTGTATTTTCGGTAGAGACGGCATT
TCACCATGTTGCCTAGGCTGGTCTTGAACTCCTGGGCTCAAGGAGTCTGCCTGTCTTGGCCTCCCAAAAT
GTTGGGATTATAGGCATGAGCCACTGTGACAGGCCCAATTCTTTATTTAAATACTTTCAGTGAGAAATTG
GAGAATTGTTACATATGTAGACCCTTCCTTGCTATACAATGCATTTTAAAAAAACAAAACTACAATACCA
TTATTACATCTTAAAATTGACATTAGTTCCTTATCATCATCACATATCTAGTCAGGAATTAAATTATCCT
GATTGTCTTAGAATTTTTCTTCCAGTTGGTTTGTTAGAATCAGAGTTCAAATAAAAAAAAATAAAGAATC
AGAGTTCAGATCTACACATTGCCTTTGGTTTATGGTTCTTTTAAGTCTCTTTCAATCCCTCTTTGTTTTT
TGTTTTGAAATTATTTGTTGAAATAATACGGTTGTTTTCCCCGTTCTCCGGTGGTAAAGCATGTCCGCCC
TCTTGAGTGTGATAAAGGGTGCGTGCCTCTGGAGCACAGTCCTGTGGGCTTAGGTGGTTCCCTTGTCACA
TTCTCAGTTCTCACATAGTCAGGCCTGTTTTGTTACCTTCTGTTCTGGTTCTCTGGTCTCTTGCATGTGC
GTGCGGCAGTATCACTGCTTTAGTGCTGGCATCAACTGTGTTCAATACAAAATAAGGATCATTCCCTTTG
ATTTCTCTTCTTTACTAGGGTTGTTATTAGTTTGTTTTGCTATCATTGCTTGTCTTATATTCCACATAAA
CTTTGAAACCAATTTTTCTAGTTGCAGGGAAGACACCCAGTGTTGTTGGGGGAAGACTCCTGTAAGTATA
TAGATTATCGAGAGAGCTGGCGTTTTCATGATGTTAAGGCTGTCTGTCCGCCTGTTCAAGAACACATACG
TTTTACCATTTGTTAAGCTTTTGTGATCTGAAGGGAGTGTTGTATATATTTTTCACACATTGGATTTACA
CATTTCTTGTTCCTAATGTTTTGTTGTATTTGTGTTTTCAATGTTTTCACTGTCATAAATGGATCTTCTC
CTCCATCTTCAAATAGATTTTCATTGTGTTGTTTGTTGCGTTTGGAAAACAAAACAGGCTCAAAACCACC
GTTGTTCTTACAGTTCAGAGTATTTCCATTTTTTAAATCTATAACTCTTAAAAATTAGGATACATATTTT
AATTTCAGTTTATATGAAAGGTTATAATCCAGGATTTTGTGAAAGTGAGATTTAAAAAGAGAATTAGAAG
ATTAAGTCACTTGATTCGAAAAATGGTCAAAATGCAGGTTTCATGGCTAAAAAAATAAAATGGCCTTTTT
TCTACCTACTCTTAAACCTTCTGTCAAAATTCACCCAGTAAGTGGAGTGAGCTTTCTGAGGAGTCCGAGC
GTTATGTTTGGTCCTTATGTGAGATACTGAGTAAAGGGCGTTGTGAACGTGCGGCGCGGCGCTCGATTCT
TTCCTTACAGTGCCCAACACCCGCAATGGAGCACACGCTTCACGGCCCCACCACTGATCACACCAACTGG
CATTTTTACTCTCCACGGCGATTTTTCAAAATACTTACAAAGAATATTTAACTAAAATGCTCTTGCCTTT
CACTGTGGCAGCTCCCTTCTTGATTCATCTAGGAATATATTTCACAGGAGAATATGGTCTCAGCCACCCC
CGTGTCTAGCCTTACTCTTTCAGCAAGAGCTGAATTAAAGGGAATCTGGAAGTGAATACTCCTGGTCTTC
TGTGAAACCCCAAAAGCTGTTTGAGAAATCACTGGCCAGGCGACGTGCCCAGAGAACAGCTACTCCTGCT
CTAGCACAGTGCTCAGAGGGACGCTGAGGGCAGCGGCTCCCCAAGCAGGCCCACACTCCCTTGCTTGTAA
TTTTGCTTGTGATAGCATGTTCTCCCTCAACAACTCATAAAATTTATTTGGTTTGGAAAGTTATGTCTGC
TAATCCATAAGGGACAGACTGTCCAGAAGTGCTGGGTGGTCTTCAGTGTGTCCAAATCCTGTGGCTTCAG
CTCAGCAAGTTCCCCAAGCAGTGGCGTAAGAGCTGGAGCCTCTCCATGGACACTTTCCCGTAGGCGGAAC
ATCCCAGCCACATGTTGACACAGCGAGGCTGATCCAATCAATCAGTGCAAATTACCAGCCGCGCCCAGCC
CCCCCTCCCCAGATGTGCTGCGTGGTCATTTGGAAACCACATGCTTTCTTTGACCAATGCACTCTAACCC
GTGTTTAGCCTTCCAACTATTTGCTTACCACAGTACACCAGTGGAATTTCATCTGTTTGACAATTGGCTG
GTGTCTTTGGTCTTGGCTTCCAAATGCAGTCATATATTTTCAGCAGTGGTCTGCCTGTCTTTTAAACAGC
AGATGCTTGCCCCTCTTTATGGTTTAGATAACCTAGAGGAACTTTTAAATTTCTTGGCCTAAATGTCAAC
TTTTCATGTCTGTCCCTGGGGCTGCCGTCATAGGCACCTGCAGGCTAAAGACGGCATAAAACCTTCCTGG
GCGGGCTGCTGAGGTCCTTTTGTAAGTCTGGAGTATAAGTAATACAGCATGACATGTCCTCTGAGGTCAT
CCGAATCCACTGCTTCAAAAATACTGAGAAGCTTGAAGACTGGATGGAGAATTTGTTCTATATGCCTGAA
TGAATGAGACACTGAACAAGTGAAAAAAAGAATGAAGGCATGACGGTGATCTCGTGATATAATAAGAAAT
GTGCATTTGGTCTTCATCCAGGCTCCTAAAACCCTTGAAATTTCCTGAGTGATGAGGTGAGAAGAGCATC
TTTTATTATTCATAAGTCCCTTTTCACCACACCTGAGTGTAGGCTAATGAAGTGACTCCTGGTGGGCCCC
CAGATAGCCTCGGGATGGGGGCTGGTAGCCAAAGGAACCAACCACACCTGACCCCCAGAGTTCGACCTGA
TCACTACTGGCCAGCGATTTAATCAGTCGTGCTTACATTGTGAGACCTCCATAAAAAACCTAAACTGTGG
GGTTCAAATAGCTTCCAGATTGGTGGTCACATCCAGGTGCTGGGAAGGTGACGTGCCTGGAGAGGGCCTG
GAAGCTCAGAACTTTCCCCCAGGCCTGGCCCCATGCATCTCTTCCATGTGGCTGTTCCTGAATTGTATCT
TTCAGAATAAATTGGTAATGGCAAGTAAAGTGTCTTCCTGAGTTCTGTGAGCCATTCTAGCAAATTATCA
AACCTGAAGAGAGGATCATTGGAACCTCTGATTTTATAGCTAGTTGGTCAGAAGAATGAGAGGCCTAGAC
CTGTGATTGGCATCTGAAGTGGGGGCAGTCTTGTGGGACTGAGCCCTTAACCTGTGGGGTGTGTGCTAAT
GCCAGATGGTGTCAGAATTGAATCACTGGACACCCAGTTGGTGTCTAGAGAGTTGGGAGCATTGGTTTGT
GTGGAGGAAGAAAATCCACACAGTGAGTGTGAGAAGTGCTCTGTGAGTAAAAACAGCTTCTAAGTAGTGG
GAGTGACTGACATACGAGTCTCTGACCACTCTAACACTCGCAGCTCGGGGTGGCTCTGAGTGTTAAATAG
GGTGGCCATATGATTTAAAATCTAGACCATGCCACTTCTGAGAGTTAAAAGAGATCCCTTTTATAAGTAT
AGTGGGATAACAGAAATAAACTTACAAACTAGGACAAATACTTACACTAAGATTTAAATGGGTTGAATGA
CTGTAATATTCTTAGCACAGTGCCTCGTATCCACAGTAAATACCCCGTAACCATTAGCGTCTACAGCCAC
TCCACCCTAAATGTGCCCAGTCTTGCCTGATCTCAGAAGCTGAGGGGGGTTGGGCCTGGGGATTAGCGGG
TGCTGTAGGCTTTAAAAAATAAAAATAAAAAGACAGGCACAGTGGCACACACCTGTAATCCCAGCTACTC
AGGAGGCCAAAGCAGGAGAATCACTTGAGGCCAGGAGTTCAAGTCCAGCCTGGGCAATGTAGCAAGACCC
TGGCTCTAAAAAATAAAAACTGTTGGTGGCCGGGCACGGTGGCTCACACCTGTAATCCCAGCACTTTGGA
AGGCTGAGGCAGGTGGATCACCTGAGGTCAGGAATTTAAGACCAGCCTGGCCAACGTGGTAAAATCCCAT
CTCTACTAAAAATACAAAAATTAGCTGGGTGTGATGGCAGGTGCCTGTAGTCCCAGCTACTCAGGAGGCT
GAGGCAGGAGAATTGCTTGAACCCGGGAGGCAGAGGTTGTAGTGAGCCGAGATCGTGCCATTGCACTCCA
GCCTGGGCGACAAGAGCAAAACTCTGCCTCAAAAAAAAAAAAAAAAAAAAAAAACCCCACAAACTGTTAA
CATATTACTATTACCATTATTGACTCTAGTAATTGTATTATTTTTGACAATGTGTAGTATTAGGTTTTTG
CAAACTCATATTTTTCCCCCTAACAATCACTGAACTAAAACCAGATGTAAGCTTAATTCCCATTGCTGAA
AGAGCTAATATGGCTTCCAACAATGCTTAATAAGAAAACAATTCATTATCTATCAGAAGAACCTAATTTA
TGCTTCTTGACTAACTTATGTATTAGTAGTTTACTCGTCTGTTATGCTCTTGCATATCAAGTTACCCCAA
AAAAGGAGCCTAACTAGAATTACTCTTGAGGAGCCACAGATTCTTTTGAATACCCTCAGCATCGCTGTAG
CCATTTTACAAATCAGGAAAATGAGACCTCTGGAAATGAAAACGTAAATTAGAAGAAAGGGCCGACCTAC
AATCAAGATGTTGGGTTTATGTTTTTTTCAACTTAGATAAGGAAAATCCAGATTTAAATGTTGTCAAATC
ATATAGGTGAGTGTTTAAACAAAGAAAAGTCAGCATAATACCAAGGACAGAAAGGTGGCAAAGAATTAGC
AGTAACTAAAACTCCCATTTCTATTAATATTGTTTATCCATGATGGAAACTGAGAGACTTCCTCACATCC
TTTTTTTTTTTTTTTTTTTTTTTTTTTTGAGACAGGGTCTCACTCTGTCACCCAGGCTAGAGTGCAGTGG
TACAGTCATGTCTCACTGTAGCCTCGACCTCCCAGGCTCAGGTGATTCTTTGACCTCAGCCTCCCGAGTG
GCTGGGACTACAGGCATGTGCCACCATGCCTTGCTAATTATTTTGTATTTCTGGTAGAGACTGGGTTTTG
CCATATTGCCCAGGCTGGTCTTGAACTCCTGGACTCAAGCAAACCACCCTCCTTGACCTCCCAAAGTGCT
GAGACTACAGGCCTGAGACACTGTGCCCAGCCACATCCTGTTTTTTTAACCTTAATAAGATATGGTCACA
AATTGAGTCACAGAAAACTTTACTTTTCTAATAAAAAATCTGCTTATATTGACGTGTAATTGCCAGACAT
TCTGGTGTGTTTGGGTTTGCACATTTCTTCTGCTTGTTGGTGGCTGCCTTTTGAGAAGTGAGCTGCTCTG
TACATGCAGATGATAATGATGGCAACTTTTGTCTGAATTATGATGCATTGCTTAGATCAGGCTGTCACCT
AAATACAACTTTAGGATCAAACAGTGTTCTTTTCAGTTCCTTGGAAGTAAGCAATTCTCCATAACAGTTA
AATCCAAGTTTTGTGAGTTTGTCTGGCAACCCAAACAGCCTTGATCTCTTTCTGGTTTGAAAAGGTGGAC
TGTTGCCAGTGCACCTTTGTCTTGGCTGAGGAAGCCCTGGCCTCCCCTCTACTGCTCAGACAGCTTTAGA
ACACAACCTCTCAGATGGGCCTCCCTCATCAAGAACCTTTCTTGTGAAGAATTTAATTCTGCATTCTGGT
TTTGTTTTGTTTTGTTTTGTTTTTTTGTAGCTATAAAAATATTTGGAGCCAAAATTATTTAGTAAGCAGT
TGGACCAATTTCTTTACCTGCTACCTCTTTTTGTAAAGGATGAGAAAACACAACTGCCTCACTAAACTGA
GTATTTGGGGGAAACAAAGTAGAGTTTTCTAAATCTCAAGGAGGTGTCTTTTGGAAGAGTCTGTTGGACA
GGGGAGAGCGTCCTGTCCAGGCTTCCCTGGCTCATGGCAGACGCTGTCACTGTAAATCAGATTTCTAGGT
GGAGCCCTGACTGGAAGCCTACTGCTCATTATTTTAAAGGAGAAAATAGTAATGTATTACACATAAATTC
TAAATGTCCACCCCATTTCCTAAAACATAACTATGATACAGAAAACTCTCCCAATTATTAGGTAGGGATT
TGGGGGAGTCAAGTTTTTATCTTACTCTGTTTTCTTGAATTCATGATTTTGGTCAATTCCAGGCAGGATG
GATGGAACCATTATAGAGAAGAAAAAGGACAACCTTAGCGTTTCTGTCACTAACGTATTGAACAGAATGA
AATTTTTTAGTTTCCCTAAAAACATTTTTTTCTTTTTTACTTTATTGTCCCTTTAAATTTTCCACAGAAT
GAATGAATATATATATTTATATATATATATATATAAATATATATATATTCATTTTGTCAGGTCAAACAAT
ACAGCACAAGGCATATACAGAAAATGTTCATTACCTCCTCCTCCTCATCCTGCAGTAATTCTGGTAGCCA
TACCTTATGCTTGTTAAACATAAAGTCCATATAAAGCCATTGTCTGCTCATTGTCAAAACAAAAGCAGCA
TTACACCATAGCCACATCACTCCAGAGCCTGCTTTTTAACCAGCGTGTCTTAAATACCCCTCGCAGGACA
CAGATCCAGCTCATTTGAAATAGGGGCATACTCCGTGGCACGAGGCCCACACTCTGTTCCGCCATCCCCG
TGGGTGCACACTGCAGTGTTTATAGTTTTGTCCTTATCATATATAAGGATTGCAGTAAATATCCTCAAAC
TGATGTTTCTATTTCTGCCAGGCAAATTGACAGCAGTACGATGATTAACACGGGGCTGTGTGTCTTGCAT
TTTCTTCAGTGGCACCACATGACTGGCCATGTGAAGCCAGTGCCTGCCTGCCTGTGAGGAGACGCACCCT
CTGCCTACCCCAGCACTGGGTGTTGTCACTCTCCTCAGCGCCTACACGGAGAGGGTGAAACTGAGACCAC
GTCGGTGCGTTTCCCTTCCTTTACTGTTAATTAGATGGGAGAGCTGCACATTTTTATCGGCCATTTGCAG
TTCTTTTTCTGTGATTTGCCTTTTTATTTAAAGCCAGCCTGGTTCAGACCACCAGGTAGAACACAAATAT
GTTGGCTCGGCCAAATTCTGTTAAGCAAGCATATCAAGATGATACTGCTTCGGCGATTCCTTCATTCAGG
GGTGATTACAAAGAGTTAAGTCACTGAGGTTTTAGAGCAAAATCTATCCAAATATTAAACACAGGTCCAT
AAACATAATCACTCACAGCAATTAGTAGGGTGTGCTCTGAATCAAGGCTCTAATAAAAAGACAGCTATTA
ACACACATCGTTTTCAAACTAGAATGGGCGCATCACGCACTTTACTGACTGGAGTGTGACTCGTGTGCTT
GAGTGACTATGCTAAGCAGGATGGGTCGGTTCTTCATTGGTTCATGTGAATTTGCTGCTGCTCCTGGCGG
CCTGGCCTGAGTGCTGCAGCAGCTTCCCCACCACCACCTGGCAGGATGAATGACAAACACCGTGCCATGG
CTCTCGGCCAGGATGTGGTACTGGCAGAAGACCTCTCACTGCAGTGAAACGCCTTTCCAGTGACATACAG
ATTCGTGTTACATGGATCCTGAAAAAAGATAAGGCATGAGGAAAGCTGGTCAAAGCCAGCACTGCTGCTT
GAGAAGGGAGGAGCCACTGAGAGGCGAACTCTCCTATTCAGAGCTTCCTGGCTCCATGATGGAAGCTACG
AGCACCCTCTCCACACCCAGGGGTGTTCTGCTTCCCCATGATTACTGGACAGGAACCCCTCTCCAGGGCT
CCATTGATGTGGCTAGAATTGGCTGACCACCTGGATGGAAAAGCCTTTCCTCTTCACAAGGGGCATAAGC
ACAGGCACGGCGTCTGGCCCACCCAGTAAAGCTGCCCACTGTTCTGCTGAGCCCAGGCCTGGCTTCTTGC
ACCCCTCCTCAGAGCCAACGTGGTCCTGTACTCACTCCAACCTCAGCCGCCCTGGCTTCAAGTGTTACCA
GCTGCGAGTCCTGGTCCTCTCTGACCTCGGCTGCCTCTTCTGTGCGGGGAGGGGATAATTTTGTACCTGT
TTTGTAGGGCTGTTAATGAGGATTCAAGTGCAAGCGAAACAGCATCATTCCAGCCACTGCTTTTCAGCCT
TTCCCACTCCTCTGCGCCTTGCCCGTTGGCAGCCTTTCAGGAGCACACTAGGCCCCACCTCTGGGCCGCC
GCCTGGGATCACTCCCGTTACCGCCAGTCCTCTGAAGTCCTGTCTGCAGTCCTGGCTTCACCTCCACTCC
TCTCCTCTCTCTGCCATGTGCTGCCATCCAGGGCCTGCCCGGCACACTCAGGGTTCATTCGCCCCTTTGT
ATCTTCTCGTGCTCTGATGACGCGTCCTCTGCTTCTGTGCCTCCTGCCATCTGCAGCTGCTCCTCCTCCC
CTGCCTGCCTCCACACTCAGAGCTTCCTCCCTTGGGGTTCTGACACCCAAATGTGTACCTTCAGCCAATT
CCTCTCCCGGAGCTTCCACCTTGGATATTCAAGGACCTATTGAATATCTCTGCTTGGTTGTGCCTCAGAC
ACTCCAAATCCACACACCTCAAACTGATCTCTTAGTAAATCCTCCAGAAATCATTTCTTCTCTTCTTTTC
ATCTGAGGAAATGGCATGTCCAGTATTGAGGGGGTGTGGCACCATGGCAGGGCTTTGCCAGGTGTGGGAG
GTGGGGAGATGAGGAACGGGGCCTGCCGGTGGGTCCTGGACAAATTGAAGCTCAGGGTGTGAGCGTGAGA
TCAGGAGGCTCTGAGGTGAATGTACCCTCCCTCCCTTCTCCCTTCCCCCTGCCTTCTGCCAGCTCCTCCG
CAGTCTCCCCGGGTCTTCAGCCTCTTCCCTGCTGCTCTTGCCCCACGGTCAACCCTGGACAAGGTCTGCA
GGAGCTACACCAAGCAAGCAGAAAAAGTGAAACCTCTAGGAACTGCTCTCCCCATGTCCCTTCCTGTCCC
TGGACCCAGTTGCTGGGCTTCACACCAGCTCTGCAGAGAAGTGGCCCAAAAGTCATGGTGAAGGGACAGG
CCTTGAAGGGGTTGTTGGGTCGGTGGGAGGCTTACGCCCCCACTTTAGTTTTCCTTATTAATAGCAGTAG
CCTTGTTTTTCTTGGGGCAAGACAGGAGGGAGATTAATGAATAGACATCAAGTTTGAAAAGCACCCACTG
GGAAGCACCCACTGTCTGGGATGTGCAGGTAAAGGGCAGGTGGCTCTCGGGGGCAGCTCTACTGTATCCC
AGAGCCAGCAGTTGGGGCTCAGAGACAGACATGTGCCCCTCATGCTCCCTCCAGGGAGGGGAAGTGGAGC
CCCAATTCACTGACACAAGAGGACCTTAATATATGTTCCTTTAGAAACAAATGTAGCTACACAAAATGGT
TGTGTCTGGGGAGTAGTGGGGCTCAGGCCTGTATTCCCAACATTTTGGGAGGCCAAGGCAGGAAGATTGT
TTGAGGCCAGGAGTTCAAGACCAAACTGGGCAAAATAGCAAGACCCCCATCTTTACAAGAAAAAAAATAG
CCAGATGTGGTGACGTGCACCTGTAGTCCCAGCTACTGGGGAGACTGATGCAGGAGGATCACATGAGCCT
AGGAGTTTGAGGTTACAGGGAACTTTGATCACACCATTGCACTCTAGCCTGGGTGAGAGAGCACGACTTT
GCATCTTTTTTTTTTTTTAAAGGAATCTTTGATTCCCAGTCCTGCTAACCTATCCAGTATCACACTTAAG
GTCCAGTGCATCAACTAGGCCATAACTACCATATATGAAATTGGATTTTTTTCTTTTGAGACAGGGTCTT
GCTCTTTTGCCCAGGTTGGAGTGCAGTGACGTGAACACAGCCTCCTGGGCTCTAGCGATCCTCCTGCCTC
AGCCTCCCAAGTAGCTGGGATTACAGGTGTGCTATCACCATGCCAGGCTAATTTAAAAAAAAAATTTTTT
TTTGTAGAAGCAGGGCCTCACTATTTGACCAGGCTGGTCTTGAACTCCTGGGCTCAAGTGATCCTTCTAC
CTCAGTCTCTCAAAGTGTTGGGATTATAGGTGTGAGCCACTGCATCTGGCCTTGAAATTGTTAGAAATAT
TTTCAACTTTCAAGCAACCGATTATAATTAGTTATTGGATATTTATGTGCCAAGCACTGTGCTAATCACT
GTACGTGTGTTGTTGCATTACAAGAACACTGTGAAGGAGATAGGCCCATTTTACAGATGAATAAACTGAG
GTTAACTTCTCTGAGATCATACAGTTAGTAGGCAGTGGCGCTGGGACCGAAACCCAGGTCCGCATCCCTA
TTGTGAGGCATGATTACGCGTGTTTGAACATGCCTATTTCTTCAGTTAGGGACTGGGCATCACGAGGCCT
TTTCCATCCCGTTTTTTATCGCTCCCTCTTTCTTCCATCACTAGACATTTGCTTATTCTTTTTGAAAGCA
ATTTTTTTCCTGAGCATTTCTGATTTCTTAAGGTGAGTTGAAGTGGAAGCATATTCACATTATTTTGCAA
ATGAGCACTTGGTAAATATTCACTGATTCTATAAATTATTAGCCACTGCTGTGACCATGATGAGAAGTCT
CACAAATTGGATTAGTGATTGCATTTTGAACTTTTTTTAATCTTCTTTTTTCAGTGAGCCATTTCTGTTT
AAAATTTTGTTTATTTCTTTCTGAAAGGAAGAAGATTTCTCTCCCCATGTCAGCTGTAGTCTGCCTCTGG
CTTCGGCACCTTCCCAGCCTTGAAAAAGCAATGCTGCATCTTTTTGAAAAGCTAATCTCCAGTGAGAGAA
ATTGTCTGAGAAGGATCGAATGCTTTATAAAAGATTCATCGCTGGTACGTACTGGGTTTTGATGAAGGGA
AAAATCCTTGAAGGAGATGCTTGGAATCATTTCTTTTAGTCAGAGAATGAAAGGGGGGGATGTAAACAAA
AGAGCAATTGGAACCTTTATATATAATCGTGTATTTACATTTTATTTTTGAAATCACTAACATAGGGGGC
TTTTCTGCATCCTTGGAGCATGCAGGGAGAGATCTGAGGTTTACTTGATTGATATGCCGTATATCACATG
TTCACAAGAATTGACATTTGCACAACAGACTTTTTAAAAACAGTATTTCTTATTTCAGCATGGAAAATAA
GTTTTTGGAAATGAACATATGGGTAAGAGGAAGAATCAATTAAAAACATTCAAAAAATAAACTTGTAGCT
CTTCACTAGAGGAAAGATGAAATAAGAGACACAAAACCCCAGAAAAATGGTTAAAGCAGCAGAACCAGCT
AAGACTTCTGTAAGTTTTCTTTTGGTGTGAGGCCACCTGCCTTCACCCTCCCCTGCGCGGTGGCGCCTGG
CTCCCTTCCCGCTCAGGACTGTGCAGCTGGGGACTCCAGCCCACGTGGACATCCACCTCCTGGCCCAGTG
TCTGGCACCCTGGGCTCTCAGTGGCCCTCGCCACCACTGACTCGCCAGTCATATTCCTTTGTGGGAGGCA
GCTCTGTGGGATTGGAGCACATTTTGTAAGGACAGGAATAAAGACCAAGGCACCCTGAAAAAATGATTCA
GAAACCTGCAGGTGCCATGGTCCCGCAGCCTCTGTCTTCCAGGAGCTCCAGTGAACTCTGCCCTTTTTCC
CTTTAGCTTTCGTAATCTGCAGGGATGTGGCACAGAGATTGCCTTCCACTTCTTCCTGCTTCCTGCAAGT
GGAGAAAGTGAGTTCCAAGAGCCACAGTGAACGGTCCGGTCTTTAGTTAGTGGCCGGGACACTGGGAAGG
AGGGAGTGTTCACCCTCGCCCTTGAGCTGAGACTGAGGAAGTCCCTGAGGTTGGCTGTGCCCACTTTTCC
TGAGCTCATAGAACCCCTACCTCCTAGAGGCCTTCAACTTGTTTAGTTCAGTTGGGACTTCTGTGTTCTT
TCTTTCTCTTTCTAGTTGGAGACTGTCTAAGGGAATCCTAATGGAATCAGTTGCCTTCCTCCGCGATCCC
GTTTCTCCCCTTGTTTCATGGCCCCTTTCACCCTTCCCCTTGGCCTCCCAGGGCGATGTGCATAGGGTTG
CAGGTGCTGACAGCCACGCTGCTCTCACCTGTACCTCAGGCTGCACACACGGATCCCACCTGACTTGAAA
GTTTACCACGATAGAAGAGAAAGGAAGACGTGTATATTAAGACTGAGAGAGCCCAAACAGATTTCTTAAG
GATAATTACTACCTAACCTTACCATCCGGAAGAGTCATATATTAAGGCAAGAAATAGGAATGCACCTTAT
TTTAAAATGGTTGCAGTACAATTCAAAATAAATCATGACTTTCAGAAGCCCTCTGACAGCCCATTCCTGG
TGATTCAAGGTCATAAATTACCTTTATTGTCTGCTAAATCTATTACTAACTTACATGTGCATACTAGGAT
TTCAGTTTCTCTGGTCCCTTTTCAGTGGCAAAATGATAGTAACTGGGCTATATGCTTGCTTCCAGGGTGC
TTATGACATTTTCCTTAAGTCTTCTCCCTATTGAAAAATTCTAGTCCCATTGCCTTTTTTCCAGCCTTTC
CTTAATCCTTGGATTCTTCCCTGAACCTTCTCCATGTCCTTTTTGCCTGTGGCCCTCATGCCTGAGCAGC
ACTGTGGTGAGCACAGCAGATGCAAGACAGAGAACGCAGGCCGTCCCATTGCACATAACTGTATAATGCT
CAGTCTCCAGTTTGTAGTTTACAGTAATCTCCCACGAGTCACACAGCTTTGAAGTCAGTTGACTTACAAA
AGCTTTTATCGGGATCATGTGTGCAGAAATTCAGAGCTTCCATTATGGCTAAAGGGGGATTCTAGAGGGT
GTTATTTGGTTTAATTTATTGTGGCATTGGCAGGATGTGACCTCTCTGTGCCTCATGGTTCAAGGACGTA
ATTACAATACAGACGATGGCTGGAAGCCCCTGATTGGTGTGGGCTGTTCTCCTCAGCATCCTGGGCCTGC
AGTGCCAGAAAGCCAGGCAGGCCGCAATAGGCCTGTGACGTGGCTAAGTGATTGCAGGGGTAACCTGAAG
AGCCTGCTTCCTAATTGCATCATCTGATTCATTTATCGCAGTGCAGTATCTTGGTGCAGTGACAGGACTG
TACAGAAGTATCAGAGAGATCTCTAAGACTCAGATAGCACGAGACTGCTGCGCTGTGCTCCAGAGGAAAC
CTGATGCCTATTACATTAGAGTTGGATTCTGAGAGTAATTAAAGTGTGATGGTCTACATAACTTGTGTTT
TATATAGAGCACTGTTAATTATATTTCTCTCTCTTGGGACTATGCAGAATGAGTCCTGGAAATTCTATAG
TTACCAAAATGTAACAAAAACAAAAGATAAAAGTGTGGTACAGGTTGTACAAAGTGAAATGACCTTCCCA
AATGTTCTTTGGCCTCTTGGACTCGCAGGTCTGATATTTTCCATTAAGACCATGAATAATGAGGGATTAG
TCTCTTATTACCTGAGTTCCAAATGACTATGTATGTATTTAACATCTAAAATAAAAGAAAAGTTTTCAAA
ACCCGTTCACTTTTGAGGCTTCCCCTTTGGCTTCCGTGCGGTGGACTGGACTGCTGTCGAGTCATGCTGT
CTGCCACGGTTGGTAGCTCCTACATCAAGTGAGGTATTAGCCCTAGATTGTCATTTACTGTACAGACTGA
AACTTTTCAAAAGCAGATGGTCTTGTGTTTTCCTTGACAGCATGGGCACGGGAAGACCATAATCCATAGC
TTCAGACCTGACCTTAAAAACCGATGTCACCGACAGCAGTGAAAGCCACTTGTTAATTATGCAGCCTTCT
TGGCATTGTTCGGTTTCCCAAGGCTGGCCCCAAATTAGAAGGATGTTATGTTTTCCAGTTACAATTTTGT
TTGTGGAGCCCAGAAAGCTATTCTTTGGATTCCACATTGGAATGAAAAGTGTCTGCAGGGTGTCAGGGTG
GCACTGTGCTTGGCTGGCAAGCTGCATGCCAGGGCCGGAAGGTACCCGATTCTCATGCCCTCCCATTTGC
TGGCAGAGCCCGCCCGCAGCTGGGTCCAGAGGAGCTAGCCTCACCTTCCCAGGCAGACTTGTCCCCAAAA
GAAAGGAGCAGAGGAGGCGCCCAGGAGGCAGAGTTGTTTCTGCTAAGATTTGATATCAGAATATGCTTCA
TTTTCTCTCCTACCTAAAAATCTTTATGGCTTAATTCAAAAGATTACTTTATCTAATAAGAACTTAAGAA
TAAAAAGCATCTAGATACCTCAGTATCCTCCTCAATATGGGATAGGTTGTGTTTTTTTCCCTCATTCTCC
AGGTAGCAATTGTAGCACTTCAGAAAGAAAAAGAAACTTCCTTTACACAGACTCCCAGTATGCAGCTCCT
CCTTGGTAAAATATTGTGCTGAAGAGTTCACTCTACATCCTGGGTGATATTGTCAGTTTGCTGTGCTTAA
GTAGCTTTTCACTAACATGCCAGGGTTTTCTTTTCCTGCTTTTTCAGTCTTTTCGGCACTTCCTTTTGAG
CTCTTTAATGTGGTGCATGTAATTGAACAAGAGCTGAAGTAGATAATTTAGCAGTAGTCCAGTAGTGCTG
GCTGATGTGTATGGCTAAAAGCTGGGAGGTTCTGCATCTTGGACTGGAGTTGCACTTTCCAGAATTAGCC
TCAGGGGGGCACCAGATCCTCCAGCATAGTCTCTGTGAAGAAAGAGGCCCACGTTGCGAGTTTCCTTGCA
ATGGAATTGCAGTTGGGGATGCAGACCTTGTGGCCAGAGATGAAGGGAGAGAGGGAAAAACCCAAAAACA
AAGCAGGGGTGGACGTAGGGGTCATTGCCACTCAGGCTGAGCTGTGAAGCAGCAGGGGGCTGAGGAGCTT
TCTTCCAGCTTGGGCTACCCGGGCTAATTGGATAGAGGCCACTGGGCAAGGCTAGAAGGACTTCAGGCAG
GGGAGGGGGTGCTGGGGATCCTCTGTGTCCAAACACAGAGAAGAGCACATGTAAATTTAAGACGCAAAAG
TACATTTGGTACTTGTTAAGTTCTTAAGCCCAGGAATGACAGATTTATCACTAATTAAACAATAATTGCA
TTATGGAGTACTGAAAAAATTGTTTGTGTATAAACAACATCTGGTAAAGATTAAAAAGAAAGAATAATTT
TTCCGAGCTCAAATTTGTTAAAAGGAACCTGAATGTTTTAAAACAAAATAGATCTGAAAATGTAAAAGGG
ATATTTAGAGTCTTATGTTTAGTATTTTGAAAATAGAAAAGAAGCAAATGGCATAATAAAAAATACATAT
TTATAAAGGTGCCTCATTGTACATGATAGATGTGAAGGTTTTGTATAAATAGGTTTTTCTCAAGCCAAAT
CATTTTTCACTTCAATAGAGGAGTTCACTGGTGAAATGACTCTTATGGAGAATCTTCTTTTTAAGAAGAA
AGGTATTTTGTAGTGAATATGCACATATTAACAACAAGGGCTTCCCACTGTGGAGAGAACAGTGGCTCGG
AAACAGCTACACGGTGGGACGGGATTGTCCGGCTGCTGGGTAAACTGGAGGGGAAGCTGCCCATCAGCTG
ATTCTTTAAATGACCCATTTCCTAAGTAAATATTTAAGCTACATGCAAGTACATGAAAATACCAGGAAAG
AATCTATTCCAGGCTTAATGAACTTCAGCTTCTCTGTCATCTGCTATTTCCTTCTTTATTTTTAAGGCGA
ATATATCTATGAAAGGTGATAGATGGAAAGCACTTGATAATTTTTTCTGTTCCTTCACTGCCTTTTTATT
TTTTCTAAAAGGGATTTGCTTTTGTCTGTGAGTTACCTTAAATCATAGTATAATTTCCCTTTTTGGTTTG
TTTTCTGTCCCTCTCCTTTTCCCTATTCTCTCTCTCTCTCTCTCTCTCTCACACACACACACACACAGAA
TCAGCAAATGACAGAAAGAAATGCTTCTTCCTGAGAATTCTGTTCTTCTTGTTCTCAGGCCTCTTTCAAG
TGGCAAGTGGCTTGTAATAATCATTGGTGAGTTGGTATGAAAATAACAGCTTAAGTAAACATCAAGGACC
GGGCACAAGAGCCTGTGTAATTTGCACAGTTCATGGTGCAGAGTGACAAGTTGGCCTCTCCCTTGCCTCT
CTTCCAAAACAGGCACTGAGACCATGGTTATTGTGTGTTGATTCCATGTTGACTTTGTCTTCCCTTGTGT
TTTGAGGGATGAAGATGGGCTTTCTTTCTAGGTGGAGGGGAGATAAACAATGCAATTCTGGGTAGCCATG
AGGGGAGATCAGAGGGAAAGCTCTTGTTAGCCCAAGGGGATGCACACCCAGCAGAACAATCGGGTCTATA
CAAGAGGGAGGGCAGAACCCAGAGCTCTCCATCTTCGCTCCCTAGTCATCCTGGGCATTCAGTGAAAAGC
CTGAGGGGGGAGATAAGGAGGGAAGGACAAGACTCATGTTATTGAAGACCTCCTGCTGACATAGCTCCCC
TCGAGTTGAAATGATCTGCCTGTGGAAATTGTTAGGCCAGATGGAGAAGAGAGAGCTTGAGAAGGAACAG
ATTTTGGTAGGATGGAGAAAAACAAACAGATGGAAACCACAAAAGGTTTATTTTATTTCCCCGCTTTTAT
AGAAAAGATAATGGCCGCAGTCATGGGGCTTCAGAGCCCTGGCTTGCAGCGTGACCTCTGGTGTGTTACC
GGAGTGCCCCACCTTACAAATAAAACAGGATCAGAGGTTAGATGCCTGCGTCATCACTCATGAAGATGCT
ACAGAGATTTAGGGGGGAAGATACGGCTTCCAAAGAAGCGTGTATTAAAACCTTAATTCTATTTGGAAGA
TTATCTTGATAAGAAAAGCAGCTTAAGATTGCTTTTGTGATTTGATGTCGCTGGGACATATGCCTGACCT
GTAGTACTCTAGTCCTCATGAGGGGACTCACTGACCCTGAAATTATGTGCTCAAAAAGTATAAAGAGTGT
CATTTTAAAAGCCATCGGTGAGGGGTGCAGATGAGAAGGAGCAGTTCACAGCTGTAGGGGTAGCAAGGGA
GACTGGTTTTCTTTTTTTTCAGTGAGGTCAGGAGATCGAGACCATCCTGGCCAACACGGTGAAACCCCAT
CTCTACTAAAAATACAAAAATTAGCCAGGTGTGGTGGCACGTGCCTGTAATCCCAGCTACTCAGGAGGCT
AAGGCAGGAGAATCTTTTGAACCCAGGAGTTGGAGGTTGCAGTGAGCCAAGATCACCACTGCACTCCAGC
CTGGCAACAGAATGAGACCCTGTCTCAAAAAAAAAAAAAAGGAGACTGGTTTTCAAATCAAAATCTCTGC
CGTTGCTGTTTCTGCAGGTTCCCCTGCCTCCTGGCCTCTTACCTGTTTTAAAAGCTAAAATGGGTTGTGG
AAGCAGGCTGAGAGTAGCCAAGGGTCTGAAATATTTGGAAAGAAAGAAATCTAAGAGGAGAGTCCATCTG
TATGGGGAAGAACAAGCAGATTCCACACAGCCAGCAGGCATTTAAAACATTGGATTGAGCGATTTTGCTA
GAAAACAGCGCACAGAAGAGGAGCAGATCTAAGCTCTCACTCTCTTCTAACAAACTGAGTAAGAGCTGTC
TTCCTTGCTCCCCCAGTGGTTTTCATAGTAGCCCTAATCTACATCTGATCATCATTTTCTTTGCTGTTTG
GAAATCCCTATAATTAGTATTGAATGATTCTCTACTAGCATCAAACCTATAGAATGGCTCTGGGATAGTT
TGACCATTTAGAAAAAAGAAATTTAATTTTACCATTTTCAAGTTTCATCTTACTTTCTATCAACGCATTT
CCAAGCTCTTATCTGTCTGCCTGTGGGCACATAACAGTGCTATTTGATCTTAAACACTCTTATTCAATAG
GCATGTTGTTGTACAAACTTTGAAAATTGCTCTGGCAAACTTAGATGAATCACATTTCTTCAAGACATAC
GGTTGCTTTTCCCTTGTTTTATTTTTTCATTATGAATACATAGAAACTTTTATATTTTCCGTGCTTATAT
CCGGTGACCTCTTAATAACTTTTATTATTTACAGTGAGACTGGGCATCAGGAGATTAACTGACATGCCTA
AGTTCGAAGCCACGAAATAACCTGCCTCTCCTCTCTTGAACGGTGGTCCTGCCAAATTATTTTCTTGCAT
AGATAATGAATTTATCTGTAAGAATATCAAGTTGGTTCCTTTTAGATAAAAATGCACATCAGTGAAGGAT
GAGGGAGCATAGATTATTTAAAGAGTAGGACATTTTAACTTGCAAATTAGAAATCTTGAAATAATTAAAA
GGAGATTTATCCTGTCCTGAAAAAGTGGCAGAGCTCCTGCCTGGAGCCCGGCGGGTCCAGCAGTGCTGAC
CAGTGGACGCTAGATGGCGCGGGCTCAATGTCATCGGGGAGGCCGCGAGGAGGCGCGGTCCTGCCTCAGT
GTGATCCAGGGCACGGCCGGAGCAGAGCGCCTCCTTTTTTCTTGCCGACGGGGGCCTGTGAACAGTGTTT
CCCAAAGCTAGTCATATCAAATGCACTCTGACTTGAATTTCCAATAGCGCCTGATCCACTAACATGTGAA
TGCTGCTGTGAAGCAGGGGTCCCCGCCCCCTGGGCGCACAGCGGAGAGGAGCCCCTAGCCTTCCCGCCCG
CACCTGCCCCTGTCAGAGCCCCGCGCTTCGCTTCCCACGGAACCAGAGCCCCATCCTGACTGCGCATGCC
TGGAATCGGGTTGTCCTCTGATGATCTGAGGAGCAACCGTTTCATCCCAAAACCATCTCCCCCTCCCGGT
CTGTGGAAACATTGCCTTCCAAGAAACCGGTACCTGGTGCCGAGAAAGTTACGGACCCTGCTATAAAGGA
TCTGTTTTGGAACACAAATGGGCATTTTCATCTGGCATCATCTCATACTTTGAGCTCTGGCCAAAAAGAT
AGGGAACCAGGGACTGGGCCAGTGAAGCTCCCCCCAGCTCCCAGGGCTACCGGAGGCCAGCTTCTGCAGA
CTCAAATAATCAGAACCCATCACCGAAATATTCAAGGAGAAATTAGATAACTTTTATTCTTCTTCATGAA
CCCCCTTTTCATCTTAACGCAAGCTGTTAAGTGCATTAAGATGTGATGTGATTTAGTCCAGCGTGGTAGT
GGTCACTGGTTTGCCAATAATAATTCTAAATTGTTATGTACCCATTACCGAATAAACAGGCTGCAGGCAC
GGGCCTGACCTCGAGGCACATCTAGCCATTTGAGGAGGTCACACAGGCACACTTCAGTAGAACTGGCAGT
ACAGGCAGGCTCCACGGCATGCGGGCAGAGGGATGTTTAAAGTTTCTCTAATACTTACTGATTCTGTATT
ATGGATCGCCTGAGCTTTTATAGAAAATGTGGGACATACAGGAGTATACAGAGGAATAAGCTGCCTGTAA
CCCCTGCCCAGGGAGACCACCGTATGCACTTGTATGTGGGGCGTTTTCAGTACAGCAGTGGTTCGTTCTT
CTAACCAAAAGGAGTATGCCAGTTTTCTGGACATCAGCAGTTCCCAGTAACTCCTTTGGCTGATAATAGC
AAGTTTCTGAGAAAGTGCTTGTGATATTTCACATTCTCATGGTCTTCTCCTTTTACAGCCTCAAGCAGCC
TGCCACCCTGCCATATTCCGGGTTGTTGATGAGATGTTCAGGTAAACGTTACACTGTTTCTTCTAGTAAT
TGATGTAAAAAAGGTTCCATTTCCAAGCATGAATCAGAAAATGTTGTGGTAGTCTCTGGCTGTATCATGG
GGAAATTAGAGTTTCTGATTCCCTCCTGTTCCTCTGAGCTTTTTGGTAATTAGAGGTAAAAACTCAAAAA
TCAGTGTAAATTTAAAGGCCAGTGCCTAAGAATTAAGATAACTTTATTTTCTTTAGCCTTTTAAGATTCT
AATAATAGAAACACAGAATTGAGTTAGGCATTAATATCATGAAATATTCATGTAGGATTTTTCTCAGCTC
AGAATAAAGGGTAGCAATATACTCCCTTCACCATGTGAGGGCTGACCAATATTTTTAAAAGACTTTAAAG
CTAAAGAAAGCCAAGAAAAATAAAAGTCATTCTTAACAGAACTCTTCTGAAAGGCAAAATACACCATGCA
TGTTCTCTTACAACACATTACATTTTTATTTTGAAAATATGAGTACTTCTTGGGAAATGCATTAGATTTA
CAGACGGCAAGAGACGAGGAGCTCACAGCCATGAAGCTGAGATGTGGCTGGCAGTTAGTGGGAGTTTTAA
CCATGGAGTACTAAGTTAGTGGGAGTACTAACCATGGAGTACTAAGACTGGACGCCCCTGGGGAGCTTGT
CACCTGGGAGTGTCCCAGCCCCTCTTCCAGGGGAGCCCATATCAGCTCTCTCTCTAGCCCCTCCCACCTA
ACACACAGCAGCAGAGGCTGCAGGGCAGACTGCAGACTTTGGGGAAAGGAATTTTTACTGTGACAATAAC
TCACCAGTAGTCAGAACAGTGTTGGGGGTTTAAAGCTAGCAAAATTTGAGAGTTTTTTTGTTTGTTTTGT
TTTGTTTTGCTTAAACAAACATAAAGAAAAATTAATTGTACAATAATGCATGGAAGCGAAACCAGGTACA
CACACATTATTTTCCTACTTTGCTGGGTGGATGGACGAGGCCATTTTACCCTTTGAGCAGCTTCGTCTCC
ACTTGTGAAAGCAAAATGTTGATGTTGCGTGTCCAGGCATACAATACAAAAATATTTGTACAGAGTATGC
AAGCCTGTGTGGAAGGGATTTGCATTGCTTAATAATTTAAGAACCAAGAAAGAGAGCTCTGCACGTTGCA
ATTTTAAAGAAAATATAACAGGGAGCGACAAATTTATCCTGTTTTCACACAAGGACTGAAATCTGATGAG
TTGAGATACTGCTGAAGCTTATGGCACAAAAAAAGTGTTTCTACTTTTCCCTTATACAGTGCAGGTTTTC
ATGTTTGCCGGATTACTTGTTAAACGTGTTCTGATCTGACTTTGCATTGTTCAGGTGTGCACTCCTGGAA
ACCGATGGGGCCCTGGAAATCATAGCCACTATTCAGGTGTTTACGCAGTGCTTTGTAGAAGCTCTGGAGA
AAGCAAGCAAGCAGGTTTGTTATATCACATATATTACTCATTCATCCCAGAGAATAAGACGCTGTTGAGA
GTATTTTGGACAAGAGCACTTTATTTTCAATAATTTTGATGGACTGTTTTGCTCACAAAGAAAGGTTCCT
AATGAGTGCCCCAACAAAGGTTAAGCCATTTTAACTTAACATAAATCAAGATCTGTCTGCCCCGTGCCCT
GATACCCAGAAGCATCTGTCTACTATTATGTCTGAGAACTCTGTCATGCCAGCATGCATGGCCCTGGAGG
ACGGCTCTTCTTGGCCCTGTGTTGTGCACTGTCTGCCGAGCAGGACACTGCCCCCTGGCTGCATCTGAGC
CTCCCAGGTCAGCAGGAGGCACCCTGGGGTCTATATGGCATGTGATGAATAGGAAAGGGCACTTATTACA
AAGCACTCCTGGACATTCTTAATTATTAGCATCTTCATTCTTATCAGAGACCCAAATGTGAATTGGCTTC
CAGGAAAGGAGGTGGTAAGAGTGACTGGGAAAGGCTTGACTAACTAGAAGGGGAGTGAGGAAGGGCAGTG
AGCGGGAGGTGTGTGTTAGACACAGTCAGTAAACCAAAGGCCAGGCCCGCACCCTGCAGAAGATTGTGCT
CCACGTCCCCAGCAGCAGAGGCTGGGCAACAGCTGCCAAGAGTCAATGACCAATTAGAGGGACCTCGTGA
AACAGGGACCTTTGCTACCAGCGAGCTTTCACCTTTCAGCATATATATTTGGCCTTGATTTCTAACGGCC
ACAGAAGTAATGTTTATGGGACACATTGCCTGTCGAGAGTGGTGCTGGTCCAGTGCATCTCATCTGTAGA
GTATGTCACGGCCCCTGTGAAGCTCTCCGCAGTTTGACTTCCGAGAGGAGAACTACAATGCTTGGCTCCA
CCAGATCACACCCCCCGCCAACGTCAAATAGATCTCTCAGGTTTTAGCCGATATTTCTACTTTTTTTTTT
TTTTTTTTTTTTTTTTGAGACAAGGTTTTACTCTGTCACCCAGGCTGGAGTGCAGTGATGTGATCTCAGT
TTACTGCAGTCTCAACCCCCCAAGCTCAGGTGATCCTCACACTTCAGCCCCTGCGTGTAGCTGGGACCAC
AGGTGCATGTCACCACTCATGGCTACTTTTTGTATTTTTTAATTAAGTACAATTTCCATTTTATTTTTCT
CAAGAGAATAGTCCGTCTTCAGACTTTAAGGACTCAACTCCTTACGTGGGCTTTGGTGGGGGTTGTGGGG
CAGCATCCGCAGGTCTAAATTGGAGTAGGGGTGTTCAGTCCTTGTGGGCTTCACAAGATCGATTCCTGAC
TACTTTGCTGTGAATTGCACAACTCAGACAGTAATGTAGCTTCAAATACAGCTTGGGAAGCACATAGGCA
TCAAAGACGCTCGCTTCAGAAATGTCCCTGACTGCTGCAGCCTCCACTGTGTTTCCAATGATGAATTTGT
TAATAGCCTTGTCCTTGGGCACACATTGGGCACAGTTCGTGTCGCAAATAGGCTGCACGTGGCCGCGGCC
CTTTTTGGTACGACCGTTGTTCCTTCTTTTTTTCATCATATTGGAGGCACGGACTGGAGGAAGCACTAAT
TTTTGTATTTTTATTAGAGATGGGGTTTCACCATGTTGCCCGGGCTGGTCTCAACCTCTGAGGCTCAAGC
AATCTTCCCACCTTGGCCTCCCAAAGTGCTGGGGTTACAGGTGTGAGCCACCACACCCAGCCTGTTTCTG
CTTTTTAAAGCAACAATAAATATATTTTTATTTTATTTTATTTTTTGAGACAGGCTCTTACTCTGCCACC
AAGGCTGGAGTGCAGTGGTATGATCATGGCTCACTGCAGCCTTTGGCTTCGTGGGCTCAAGCGATCCCCC
CACCTCAGCCTCCCAAGTAGTTGGGACCACAGGTTCAAGCCACCACGCCCAGCTAATTTTTAAATTTTTT
TTTGTAGAGATAGAGTCTCTCTGTTGCTCAGGCTGGTCTCAAACAGCTGGGTTCAAGGGATCCTCCCACC
TTGCCCTCCCAAGGTGCTTGGATTCCAGGCTTGAGCCACTGTGCCTGGCCAACAGTAAATATTTGTGATT
TATTTTTTCCCACCCTCACTTTCCCTGGAGAAGTTAGCTGGGCTGTAGCAAGCTGCGCTATCCATGGTCC
CACCTAGAATTTTGGAGGTGGCTCGGCTGGAAGGCACAGCTGGCCCTCACGGTTATTTTGAGCCTAACTG
TAAATGTCTCTGAGCCTCCCTTGTGCATTCTTTGTAGACCCCATTAGGAACGGGCCTCTGGGGAGTCTCA
CCTGTGGCCTCGCGGAGCACACCTGGGTTGGAGCAGAGGCCACGGAGGAGTGCCACTGTGCTCTTTAGGG
TTAGCTCGCGCCTCTTTTTCTTCTTAGCTTCACCCTCAGCCTCTATGTTGGCCGTGGGCACTATGGATTG
GGACTGATGTTGCAGTTGCTTTTAATTGAGACTAGTACCCTGACCAGGCATACGTATCTAAGGACGTGGG
ACCACACACTGGGTCCTGGTGTGAGGCAAGGCAGGGATCCAAAAACAAACAGGAATTCACCACCCTCGCC
TTCAGCTCAACAAAGGAAAGGAAAGTCTCTTTGCTTTGCCAATGCCTGCATAGGTATCTGTTAGTTTATT
TCTCTTCCTAGAGCTGGACCTGAGTGCCTGTCTTTTTAACTGATGGCCATCTACATCTTTTGACCCTCTG
CCTTCTTGACTGTCCATTTTTAGCTAATCAAAACCCTTCATGTCATATTTGGTAGATGCGTGACCCTCTT
TTCTCTCTGTGTTTTATTCATTAATTCCTTCTTAATAAAATGAGTATCTGTAAACCTGATATCTAATAAT
CTGAATATATGTCTATCCACGTGCTCCTCCCTGCCTCTCTCCCTCCAGGTAACCTCTGGTTTGAATTTTA
TGTGCCAGGCGTGGTGGCTCACACCTGTAATCCCAGCACTTTGGGAGGTCGAGGCAGGCAGATCACAAGG
TCAGGAGATCGAGACCATCCTGGCTAACACGGTGAAACCCTGTCTCTACTAAAAATACAAAAAAATTCGC
CGGGCATGGTGGTGGGCGCTTATAGTCCCAGCTACTCAGGAGGCTGAGGCAGGATAATGGCATGAACCCG
GGAGGCGGAGCTTGCAGTGAGCTGAGATTGCGCCACTGCACTCCAGCCTGGGCGACAGAGCGAGACTCCA
TCTCAAAAAAAAAAAAAAAAATGAATTTTATGTTTATTATCCCTTTGCTCTTTCTGAAAGTAGTTTGATC
ACATATATATGACTGCCTAAACAATGTTTTGTTTAGTTTTGGTTGTTTTTGCACTATATAAAACAAACAG
GAGCAGCATACTCTGTGCAATCTTTTGAGACTTGCTTTTCCACTCAGCAGAGACTTCTTGACGTTGCCAT
GTGTGGCTGTGGGGAAGTACTGTTATGCATAGTCCATTGTGAAAACGTATGGCAGTGTAGCCATCCTCCT
GCTGGTAGGCACTTGAGATGCTTCCAGGTTTTGTTTTTTATTACAAACAATGTTGCTCTGGACACTCTGG
GATAGATACTTAGGAGTGGAAGTGTATTTGGAATACAAAAGTTCAACTTTCATAGATCCTGCCAGACTCA
TTTCAAAAGTGTTGGTGCTCATCTGCACTTCCTGCAACAGTTTATGAGTGATCCCATAAATCCACATTCT
CTCCTATCATCAGAAGCACTCATGTCAGTGCTTCTGTCTCTTCTTACCCTTTCCTCTTGTCCCTGTTCTG
TTTGGAGGACACAGTCAGCTCCATCAATATGCCCTATCAGACAGTAGGCAGAAATTGAAATGGGTGTGAC
AAGCCACTTTTTCTAAGCCTGCACTGTGGCTCAGTACAGCCAGTCAGGTCAGTTTCTGGTTGCAGCCATG
ACAGCATCTGGTAATGAGCTAGATTAAATCATCTCCCACAGATAAAAATGATAAACTCCAGGCAAAGTAT
TTTTAAAAATCTATTTGAAGGCACTACAGAGCACCTGAAAAAGTGGACAGAAACTGGAGGCCATCAGCCC
TTTAAAGGGACATCACACAGAGAGGTCTCCTGCCTCCCCCCAGCTGCCCTCATGTGAGGTTGGAAGGCAG
GCAGTGTGGGGCCAGGAGAGGGCCAGAACTTGGCACAATCTGATTGACTTAAGGTGCCAAAAAATAGAAG
TGTAAGCTGCCAAAGGAACAAAAAAATTGAGGGGAAAAAAGAAAACCAATGTCAAAAGATAGACCTAAAC
CCAAAACTACCAACAATGACATTAATTTCAGCAATTAAATGGAAGTTAAATATTCTAATAAAAAGGCAGA
AACGTCAGATTGAACAAAAAAAATGAAGACCTGGCTGGGCACGGCGGCTCATGCCTGTAATCCCAGCACT
TTAGGAGGCCAAGGTGGGAGGATTGCTTGAGTCCAGGAGTTGAGTTCAAGACCAGCCTGGGCAACATAGT
GGGACCCCAGTCTCTACAAAAAAGTAAATAAATAAAAAATTAGCTGGGCATGGTGATGCATGCCTGTAGT
CCCGGCTACTCGGGGGGTGAAGTGGGAGGATTGCTTGAGCCCAGAACGTGGAGGCTGCAGTGAGCCATGA
TCACACCACTGCACTCCAGCCTGGAAGACAGGGCGAGATGCTGTCTTAAAAAAAAAAAAAAAAGATTTTA
AAAGCCATTGTAATCAAGACAGTGAGGTATTGGCAAAAAGACAGCCATAGATAGATCAGAATTGAGTCCA
GATATAGACCCATACATATGTGGCCAACTGATTTTTGACAGAGATGCCAAGACAATTCAATGGGGAAAGG
AACGTTTTCAACAAATGATGCTGGAATAACTGGATGTCCATATGTAGAAAAATGAACCTCAAACATTACC
TTGTAAAGCACACAACAGTTAATTTGAGAGGATCATGGGCTTCAACAGAAATGTTAGAAAGATAAAGCCC
CTAGAGAGAGCATAGGATAATGTATCTGTTTGACACTGAGGTGATCTAAGATTTCTCAGAAGCACTAACC
ATAGGAAAAAATGGATAAATTAGACCTCATCAGAATTTAAAACTTTTAGGCTGGGGGCATAGCTCACTCC
TGTAATCCCAGCTCGTTGGGAGCCCCAAGGCAGGAGGATCTCTTGAGCCCAGGAGATGGAGACCAGCCTG
GGCAACAAAGTAAGACCCCTTTTCTACAAAAAATACAAAATTTAGCTGAACGTGGTGGCACACACCTGTT
GTCCTAGCTACTCGGGAGGCTGAGGTGGGAGGATCACTTGAGCCTGGGAGATCAAGGCTTCAGTGAGCTG
TGATCATGCCACTGCACTCCAGCTTGGGCAACAGAGTGAAACCATATCTCAAAAAATAAGAAAGGAATGT
AAAATTTCTATTCTTTGATAGATATCATTAAGAAACTGAAAAAGCAGGCCAGGCACGGTGGCTCATGCCT
GTAATCCTAGCACTTTGCAAGGCTGAGGTGGGTGGATCACGAGTTCAAGAGATCAAGACCATCCTGGCCA
ACATAGTGAAACCCCGTCTCTACTAAAAATACAAAAATTAGCTGGGCATAGTGGCATGTGCCTTTAGTCC
CAGCTATTTGGGAGGCTGAGGCAGGAGAATCGCTTGAACCTGGGAGGTGGAGGTTGCAGGGAGCCAAGAT
CACACCACTGCACTCCAGCTTGGCAACAGAGCAAGACTCCATCTCAATTAAAAAAAAAAAAAAAGAAAAG
GAAGAAAGAAGGAACTGAAAAAGCAAGCCGTTAGCTAGGAGAAAATATTTGTAATATATGTATACAACAG
AGGACTTGTGTCGAGAATATATGAAGAGCTCTTATAACTGCCTAAGAAACCAGTTTTTAAAATGGACAAA
AGACTTGAATATATACTTTCAAAAAAGATACATAAGTTGGCAGTAAGCACATGAAAACTGTTCAGCGTCA
TTTGCCATCAGGAAAGTGCAGAGTGAAACAGGTAGGAAAGCAAGCATACATAGGGTTATGTTCCCAGCCA
CTAGAATGGATGAAATGCTGGGGAGTATGTGGAGCAACTGGAATTCACATACATTGCTGGTGGGCGTAAG
ATGGTACAACACCGGAAAACCATATGGCCTTACGATGTTAAACAAGCATCTATCTGTGACCCAGCAGTTC
CATTCCGATGGCATCCCCAGGAGAAACAGAAACACATGTCCATGAAAAGACATATGTATGCATGTTAACT
ACAGCTTTATTCATGACAGCCCCAAACTGGAAGCAGCCCAAATGCACATCAAGAGGAGAATGGCTAAACA
GACTATGGCATATTCATACAATTCAGACTACTTCTGAGCAATAAAAACAGAATGATCTACTCGCACACAA
TAACGTGGCTTAATCTTTAAGAAAATATGTTGAGCCCAAGAAGCCAGACACAAAAGAAAACATACTTTAT
GTTCCCTTTACACAAAATTCAAGAATAAGCAAAACTAATCTCTCTTGTCAAAATCAAAACATTGGTTGCC
AGGGTGGGGTGGAGGGAATGATTGTTAAGAATTGGAAGGGGACTTTTTGGCGTGATAGAAATGTGTCTTC
ACTGGGGTGGTGGTCACATGGATTTGCACATTTACCAAAACCTCATATACTTAAAGCCCATGCACTCCAT
GCGTTATAGATTTTACCTCAATTTTTAAAAAAGCTTCTGTGCCCCTTGGGGGCATAGATAGCTGTAGCTC
TTTGGCCCTCGAAATGCGAGCACAGTTTTACACTTTTGTTGTTATTTTAAAAACCATGCTGAGCCAGGCT
CAGTGGCTCATGACTATAACCCCAGCACTTTGGGAGGCCGAGGCAGGTGGATCACTTAAGCTAAGGAGTT
CAAGACCAGCCTGGCCAACATGGTGAAACCCCATCTCCACTAAAAATGCAAAAATTAGCCAGGTGTGGTG
GCATGTGCCTGTAATCCCGGCTACTCAGGAGGCTGAGGCAGGAGAATCATTTGGACCCGGGAGGTGGAGG
TTGCAGTGAGCTGAGATTGTGCCTCTGCACTCCAGCCTGCGCAACAGAAGGAGACTCCATCTCAATAAAA
AAACAAAAACAAGCCGGGCATGGTGGCTCACTGTAATCCCAGTACTTTGGGAGGCCGAGGCGGCCAGATC
ACCTGAGGTCGGGAGTTCGAGACCAGCCTGACCAACATGGAGAAACTCTGTCTCTACTAAAAAGTACAAA
ATTAGTAGTGCTTGGTGGCGCATGCCTGTAATCCCAGATACTTGGGAGACAGGGAGGAGAATCGCTTGAA
CCCGGGAGCCAGAGGTTGCGGTGAGCTGAGATCGCGCCATTGCACTCCAGCCTGGGCAGCAAGAGCAAAA
CTCCGTTTCAAAAAAAAAAAAAAAAATGCTGAAATACCTAACATCTCACAACGGCTTTGGCAAGTCTTTC
CAAAACAGAAGATTTATTTGTATAATTGGGTTCATGTGAAGTAGAACTCATAAAGACATCAAGAGCATAA
ATTTTTAAGTCCCAGAAGGTGACTTTAAAAAGGTTAATTATTCTGGAAAATATGAGGTTATTGGGAGCTT
ATTTTTCAAAAAATAAATGTTTAAGAAAGTGTTCTGACCATGTTAGTACTGGTGGGTCTTTTTTGGGCAG
AGGACTCAGAGTTTTGTATTTTCCTGACCCCGTTTCAATCTTAATGTTCATGCTCTTTGGATTTTCCATC
CTGTGGCAGCTGCGGTTTGCACTCAAGACCTACTTTCCTTACACTTCTCCATCTCTTGCCATGGTGCTGC
TGCAAGACCCTCAAGGTGAGTTAGGGTTGACTTTGCCCACATCAGAATGATTTCCTGGGAAGAGCATTGT
CAAATTATGACCTCCTCATCAGGCCCTTATCTACAGCATGAGGGAGACAGAACTGGTTATTTCTAAGATC
CCTTTAAGCCCCCAGGATCCCACATTCTGTGGATTTTGATATGAGAGTCTGCTTGGCTTCCCAGTTGTGA
TCACTTACCAAAAGAAGAAAACAAACAAAAAAACAATGGCCTCTGGTAGGTGTTGCTAGTCTGCCTCCAG
ATAACACAGGCTCTTCTGGTGCCAACCAGATCCACCAGATGCCAGGAACAGGCTAAGACTTGGCTGAGTC
AGAATAAAACAGTACATTCGTTTGCTTTTCATTCTTTCTACTCTGTGCAGCCTTGTTGCAGAAGAAAAGA
CAAAATGATGGATGAAGCTGAGGAAATGCAGGGGAAGTTTCCCCTAACCAAGCTAAGGGAAGGATTTTGA
GAGAGTTCAGTAAGGTGCTTCATCCACAGCCTCTCCTGATATCCTTTGCCAGCCTTCCAAAGGCTATCCA
GCTGGGGAAGTGATGGTTCCAGCCTTCATTCGACTGGTGTTGATCCAGGAATGTGGCTGTGAGCTCACGC
TTAGGAGACATTTCGGAAATAGAGAATAAGGGCATCCTTTCCCTCTGAGGCCTGAAACCTGATGGAAGGC
AGTCCTGACATGGGCACAGACTGCGCCAGCCAGAAAGGGGCCTTATTGGAGCATGGGAGGAGAGGAGACA
GAAGGGAACGAGCCAGTCACATTTCCTTTTTATGCCATTTTGGGCCTGCCTTTTTTCTGAGACTTGAGTG
AGTAGATCTGTTTGAGAAATGCAAATGATTCAAAGTTTCAGAGCATTTTACAAAACCTAAATTCCTCTTC
CTTTTTCGAGAAGATGTAGGTTCTTGCCCAGGGTGATCCCCTAACACTGTCTTCTCAGATGCTGGAGCTA
GGGGTGGGATCTCTGGGTGACAGTTTTATGAAAACTCTTGGGAAAACTTTATTAACAAGACAGAAAAATG
AGGAATTCACTCTCCCAGGGTTCACCTTACGCTTAGGTCAGATCAGCAAAGCCTAAAGTCAGCCAACAGG
GGACGCTGAGTGAGCTCCAGAAAATGTACTGGAGTTGTTAGTGTCTCAGTTTGGAAATAGTAAATAAACG
GTGAGGTGGTGCATGGGCATGGGCCCAACCCTTTACCTTTCCGTTTGTGTAACTTGTAGATTTATGTCCA
AATATAAATAGGTGGCTTCGGGCAGAAGTACAAGAACCTCTTGTGCTAGTTCCTAGAAGAGCTGTCTGTA
TATTACTTTGGGAAACAGTGTTATGGTCACAGATTGAAGAAGTGTTTTTTAGTGGCATGATCTTCTGTTT
ATCAGAAATTTATTTCATACCCATTGTGAAGGCCGGGAGAGGGGTGTAAAAGAGGATCACTTACGAGCCC
TGACTGTGTAGACACTACAAGTGGAGGAAATGCGAAATAAACATCTAAATAGCTAGTAAAAGGAAGAAAC
GAAAAATACCTTCAAAAGGCTGTGCACCAAGGGCCGCGGGAGTTCAGAGGAGGGAGGCGCTGGCCTTGTG
GAGTAGCAGCAGTTTGTCCATCACTCGCCTTACCTTCCTTGTGTGTTCGATTATAGCATCTATCACTATG
TGAAAACTTTTGCAGATGCTGCACAGAACTGCAGATACGTGCTGCTCAGCTGTATTTAAAACCACAGGAT
GACTGTGAAACCAGAGCAGCTCACTCAAGAAAAGACATTTGTTTGCATAATGCTCACTTATTTTCTTTCC
TGGCCTTTTTTTCCACTGTAAACCTGAAATCATATTGTGAATTCATCACAGCCCTAGGAAAGCAGTCAGG
CAGTCTATTCCTAATTCCTTATTGGCTGCTTTACTACAGTCTCCGTCTATTTTGAAATCAACACATTAGT
GATGGAGGAGTGTGTAGGTAGAAAAGAAGAAACCTAGGGCATCCGCAACCCGGCATTTCCCAGTCTCAGC
GGGGGCTGCTTATGCAATCTCTAGCTACTTCCATGTACCTGAATTTAAAATTACTTGAGGGCAAGCGTGG
TGATTAATGCCTGTAATTCCAGCACTTTGGGAGGCCAAGGCGGGAGGATCACTTGAGCCCAGGAATTTGA
GACAAGTCTGAGAAACATAGTGAAACCTCATCTCTACAAAAAAATTTTAAAAATAGCTGGGCATGGTGGT
GCACCCCTGTAGTCCCAGCTACTGGGGAGGCTGAGGTAGGAAGATCGCTTGAGCCCAGGAGGTTGGGGCT
GCAGTGAACCAGGATCGTACCACTGCACTCCAGCCTCTGACCAAGCAAGATCGTGTCTTAAAACCCCACA
AAACTAAAATTAAAAGATTAGATTCTTTGATGTTCAACTCTGTGTGACATGGACAGATCTTACTTCCCCA
GGCTTAAGAGATAGGTACTGGCTGGGAAAAGCATGAGAACAGTATTGGGTTCCGTGAACCAGAAGTAAAG
GGCGTCTCCCAAAGACTCTTCAGGTCATCCCTGCAGGTGGTTCCTCATGGGCTTGACATTTCCTCAGTTG
CCCTCTGACGTATCTCTCTCCACCCGCAGATATCCCTCGGGGACACTGGCTCCAGACACTGAAGCATATT
TCTGAACTGCTCAGAGAAGCAGTTGAAGACCAGACTCATGGGTGAGCAAACACTGACCACTCCCAAATCT
ACTTCACACATGGTTTCCCTAGATCCTCATCTGCCCTTTGAGCAGGGCTGACAGAGGAAGGCATTACTGG
TCTGGGACCATCACCAAACAGGTGAGCACCATGGTGAAGTGAGAAGTGGAGGAAGCGCATGGCTGCACGG
ATGGCTTGGAGCAGGTCAGGATGAATAGGCATGCGCATGTATGCATGTGCCAATACCTGTATCGAAATGT
TTTCTACATTAACGTCTGGTTTTAGATTTTGAAATATACAGGCATAACAATAAAAAGAAGAGGCCTTGGA
AAAAGCAGCACCCACCTGCTGGGAACCCCTCCCTGGCCGCACAGAAGGGAAAGGGCACTTGTTTGGGTCC
TGTGGTCTTCCCTCTACCTCTCTAGGGAAGGAGATTTGAAACTCCTACACAGTAGGGTGGAATGTTAAAT
GCTTGCTTTTCCTTCTCTCTAATAAATCTCTCTAAAATGAGAAAATCTATTCTAATATAAATTCTGGGTT
GGTTGGTTTGTTTTAAATTTTTAGAGATAAGGTCTTGCTCTGTCTTTCAGGCTGGAGTGCAGTGGAATGA
TCACATCTCACTGTAGCCTCAAATTCCTGCGCTTAGGTGATCCTCCCACTCAGACTCCTGAGTAGCTGGG
ACTACAGGCGTGTACCACCACACCTAGCTAATGTTTAAATTTTTTTGTGGCCGGGCGCGGTGGCTCACAC
CTGTAATCCCAGCACTTGGGGAGGCTGAGGCAGGCAGATCACAAGGTCAGGAGATCGAGACCATCCTGGC
TAACACGGTGAAACACCATCTCTACTAAAAATACAAAAAATTAGCCGGGCGTGGTGGCGGGTGCCTGTAG
TCCCAGCTACTCGGGAGGCTGAGGCAGGAGAATGGCATGAACCCAGGAGGTGGAGCTTGCAGTGAGCCAA
GATCGTGCCACTGCACTCCAGCCTGGGTGACAGTAAGACTCCGTCTCCAAAAAAAAAAAAAAATTTTTTT
TTTTGTAGAGGTCTTGCTGTATTGCTTCAAATTCATGGGCTCAAGTAATCCTCCTGCCTTGGCCTCCCGT
CGTGCTGGGATTACAGGTGTGGACCGCTGTGCCTGGCTTGTTAATTTCTTAACAGTAGTGTTAGGTACCC
TCTTATGTGTGTGATTTTCTTGAAAGCATTCACATTTATGCCTTGCTAAATTCCTTGTATCATAACACTC
TTTGGCTTCCTCTTTCAGAGTATAATTTTATTCATTGTCCCTGCTAGCCTACTAAGACTATCTTATTTGT
TCCTTTTGCCACTTTTCACTCCTGGAATTCTCTGTAGTCTCACACCGAGTTGACACAGACAATGGGTGAC
ACACCTATGTCCAGCTCCGTGATTGATGGCTTGGGTGCCAGCTGCTCACTCCTTCCTCACCATGATTCTT
ACCGACAGAGACCAGACAAAAAAGGCCTGCAGCCAATGGAGGCTGCGGGGTTGGCCACATGAATAGCCTG
CAGTGGCCAGTCGGCCCCCCACACACCCTCCCTGGTTGTCCTGGTGTTACACAGAGCTGGACCTTGAAGA
ATCTTAACTCGGGGACAGGACGTAGATGCAGGTGGCATAAACAGCCCACCCTGTGATTGAGACATGTTGT
GCAGTGGGTGCCCTGGGTGTTTTTCTCTTCTCTCTACCCACCCTCTCCACCATCACTCAGAATGTGTGAT
GTCAAATGCGTGAAGACTGGAATAAAACAGCAACCAGAAAGGGCGCATGTGGTGCTGCAGAACAGGACTT
AGACCTCGTGGGGCTCCCACTTCAATCCAGACCTTGGAGCCATGAGATACCTTTCAGGTGGCCACATGGG
ACTGCTTGTGCATTCAGCTACTGGTGGAAGACAGAGGGAAGGACCAGACCGGTCTCTGATCCTGATCCAG
TCACGCTGCCAACCTGGGAGCTGGGAGCATGAGGGAGCCTCACTGCTCTGTGCATCTGTCTACCCTGACA
TGGTGCCTGCAGGGAAGAGGCATGGCAGAGTCCCCTCCTCACTCTGGTACAGCCTAACCCAGCCCACAGC
CAACGTGGCCTCCAGAGCATCAGCTCTGACCATGTCCTGGGAAAGAGGGACATGTCTCTGTTGCTCAAAT
GTAGAACATTTAACCACTTGTTCTCAGGGAGGACTGGGGCAGGAGGACAGCAGTGTCCAGGGAGGCGAGG
ACAGTGCTTAGAGCTTGGGAATTCCATGGGCCAGGCAGAGGAACATGCAGGAAGATCCAACAAAGGGGCC
AGGAACACTCCTGTTCCAGCCACTGCCCCAGTCCAGAAGGAATGTTCTCATCTAATGTGATCTCAGGCTG
GTCTGTTCCATCCTCTCCAAGGGAGATGTTCACCTGCTGAGACCGGCACTGCACACAATTAGTAGGCCCT
TATCTCAAGCAAATTCTACCCTTAAAACAAGTATTGCAACTCCCATTTGCCAGTGTGGCGAGGGGATAGC
TTCACAAACACTTCAACTTTCTGGCATTGATGCACCCATGATGACAGCAGCTCATTAAAAATTCGTAGTT
GCTGAAATATCCACCTGAACTTTGCGTCTTGTCAGAAGGGAAATAGCCCATGTTTCTGCCTGCGTCCTAC
CCTCCACCTCTTTCTCCCCATCTCAGAAGGCAGGGAGGTGTGCCGCCACATCCTGCCACATTCCTGTTGG
TCATGGCCGCAGTCTTCCTTCTTCAGTGCCTGTCCTCACTGAACGTACCTGGATTAAAGACTCCGATGTC
CAAAGGCCTCAGGCCTCACGGGGGTCCTGAGAGGCACTCTTTCGATGTCCTGTGATGGTGCAGAGTGGCG
TTTGGACAGGCTTTCTGAATCTAAATTGTATTCCTTGCAGGTTGCACTTCAGTGGATAAGTACAATTTAA
GCCAACCGTTGGCAAACGTTAAAGTTGCTTTAAAAACCCAAAGGAAGAAGAATTTAGGTTGTCAACTGCC
ATGTGTTCTGCCTCTGTTCCAGGTCCTGCGGAGGTCCCTTTGAGAGCTGGTTCCTGTTCATTCACTTCGG
AGGATGGGCTGAGATGGTGGCAGAGCAATTACTGATGTCGGCAGCCGAACCCCCCACGGCCCTGCTGTGG
CTCTTGGCCTTCTACTACGGCCCCCGTGATGGGAGGCAGCAGAGAGCACAGACTATGGTGGGTAGCAGGC
CCCACTGCATGTGTTTGGGGTGGGCTCTGGGGGGCTGAGAGGAGCTTGCAGAGAGGGGCTCTGTTGTGGG
CTTGGCTTCCATGACACCTGAGCTCTGCCCACAGATGGCATATGTCATGGCAACCTGCAGGCATGGTGAT
CTCCAGCCTTGTGGTCAGAGGCGTTCTCCTGTCCCCACCGAGGTGGCCAGAGACGAGACGCTGCCAGCCC
ATTCTCCTGCAAAACGAAGACCCTTCTTCCCCAAGGTCATTTGATCTGTTATTGCTCAGCTGCCATATCT
GCCCCAGGGTCGCGTCCTCCAAGGCGTGCCCTGCAGAGGCGGGCTGTTCTGAGGGGTGTGCCGGCAGCAG
AGCCTGGCCACAGCCAGGGCCCTGTCTCGCTCCCCAGCAGCCCGGCCAGGGCTTGCTTCCATCTTGACTG
TCTCCTTTCTTGGATCAGTCAACAGATCCTCACATTACTGGCTTTATTTACATCTCTTACTAAAGTAATC
AGATGATATTAACCACTTTGCTTCTGAAAAAGAAGTTGGTCATTTCCTAAATAACAGAGCAGCTAAGTAT
GGGACTGGATAACTGTCTGTGGCAAAGACAGTTGTTATTTTATGTGGAATATAATAATTACAGGAAGCAA
TGCTTTGATTAAAGGCATTGGCACCTCCCTTGCAAGCATTGATTTGCTAGGTTCTTAAAACTTCAACTGC
CAGTGCTCTATGCTGATCTTAGTAGTTAAAGAGGACAAGGCTCATTTTGTATAGAGCCCTGCTTCTCTTG
GCTTTGGCATTTTCTGTTGTTTGAAAACACACAGACTAATAAAGATGTCTGCGTATTTTGTTTAAAGGCT
TGCATGGCATAGGAAAGAAAAATAGTTTTAGATTTTAAAAAGTTGAAATTTGGTGATAATTTATTTTGGA
TCAGAAATAAAGCTTTGTGAAAAAATTATAACCCACGTATGTATTTGAGGATTGCTGTCTGATTAAAAAG
AAAGCTTTTTATTTCTTCCCCTTTAAAAGATCACGTTAAGCTAAGGAAAATCCTGGTTGATGTTTTTAAC
AGTAATAAGATGTACGGGGCACATATGGTTTTTAAAGCCCTTTTATATTCTGTCTTATTTGATTCTGAAT
AAGCTAAGTTGGTAGATATGTGTTCAATTCCATCACAGTCAAAAGGTTACTGACAGAGAATCACTTTTGA
AGTATAAAGAAATAAATTATTCAATAACACTTAATTTCTAGAAAGTTCTACATTGGCACATCTTCTACTA
GCTAACTTGGTCCTTTTTTATGAAAAAATAAAACCCTTGCGTAGTTCTCCCTCAGGGGATGCCTAGGATT
TTGGATGAGAACGTATTGGCTCAATGTGAGTGGGGCAGTGGCAGGCATCCATTTCCCTTCCCCCCATTCT
GTCACAGGTGCCCATCTGCCTGGCAGTTCAATCCAGTGCTCATGTTGGTGACTCCAGAGCCCCTTCCTTG
CTGGTGCCTGCCTGAGGCATTGGTGTATGTGGCGTCCTGGGAAGGGGATTTTAGTTTAATGAATGATACG
TACCTCTTGTTTTCCTGGGTTTTGTGAGCTTTAATCCCTTGATGGTCTGTTGGGAGGCTTGAGAGACAAA
CTGTGAACTGTGTTAGAAAGCATGATTCGTATGTGATTGAATTGAAATTAGCAGTATCTCTGCATTTGTG
CATTTACTTAAAAAGGCACAATTAAATCAGCTGGTGGCGTATCCCCGCATCGTGTGCTGGGCCTGGCGTC
ACTGCCTCTGTGGATGTCCTTGAGGTGAAGAACATGGGTGCAAAGACCAAGCGTGTCCCCGCCCAGGATG
TGTCCTGCCTGTGAGAAGGCCTGTCCCACTCATGGGCAAGCCACCCTTTCCACCAGCAGCCAGAGTTCAT
CTCCTTTTGCCAACAACTGAATCAGATCACAACAAAATAAAAAAAAGTCGTTTAGATACCCTTAAGAATC
AGTAAGGTACAATGATGCCTAGAGAAAAAAAGGAAAAAAAAAAATCAGGCAAGGGTTCATACCCTTTAAC
CCTGTGGTTCCACTTCTAGGAATTACCCTGGGGAATAGAGATCCATGCAAAGGCTTATGTATAAGAATAT
TCAGCACAGCATTGTTCATAAATACAACAATGGGAAATGGCCTGAACTTTCAATAGTAAGGCTACTGGCC
AAATAAAGTGTGGTATATCCTAACCATGGAATAGCATTCTGTTACATACCATGAAAAATCATGCTCTTGG
ACGGGTGTGGTGGTTCATGCCTGTAATCTCAGCACTTTGGAAGGCCGAGGTGGCCGTATCACTTGAATCC
ATGAGTTTGAGACCAGCCTGGGCAACATAGACCCCTGTCTCTACAAAAAAATAAATAAAGAAATTAGCCA
GGTATGGTAATGTGTGCCTGTAGTCCCAGCTACTCGGGAGGCTGAGATAGATGGAAGGATCGCTTGAGCT
CAGGAGGCAGAGGTTGCAGTGAGTAGAGATTGCACCACTGCATTCCAGCCTGGGTGACAGAGCAAGGCTC
TGTCTCCAAAAAAAAAAAAAGGTCTTGAAGAGCATGTTCTATAGATACAGTGAACTGAACTGCTTATAGT
ACATTATGGAGAGAAAAATGAAAGATACAAGGCATTATGTGTAGTGAGTGGTATGGTCTCAGTGCGTAGA
AAAAAGACAAGAAGTATATAAACCGAATTATTAACAGTGAGTCTTTTTGGATGGTAGAGTTATAGATCAT
TTTAATGGTTCTTCTTTTTCTCTTTTCAAATTTTCCATAGTAAGCATATATGTCTTTATAATGCAGGATA
AAAAATACTTTAAAAAGAAAAGAAAGCTTTTATCTTTCTCCTGAAAAACTTAGGACATGTTTAAAGTTAG
TTATCGGTGTTCAAGTGGAAGCCCATGAGCATGGACGGCCTCTGAAGGGAAAGACAGTCTGGGCCAGACA
TAAAGGAAGATAGACCCCATCTTAGGGATTATTGGACAAGGGCAGAAAGTCGGTTGTGGGTCAAGAGAAA
AAACAGATATAAAGGCATAGCCTCCTAAACCCTGACATTTTTGCAGACCCAGTTAGATGGCAGAATGGCC
TTGGGCTCCCGTAGACACCATCAGACCCGGCAGGCTGGGCCGGCTGAGGGGCGAGGTGGGGAGAGTGAGG
CCTGCCCTGCTGGAGCGCTGCCGCTCCCCGTGGAAGAGCCCGATGGTGCAGTTTCTCACGGTCTTGTATT
GTGGTCAGAGGAGCTCACACAACACACCCAGTGTACTGGAGTTTATGACAGACTTCATTGAATGAGGCCT
TGACTTCCAGGGAAAAAAAACGCCTCACACAAAATCCATAAAATCGGTCATGGGAATTCTCAGAATAGGC
CTAAGTATTCTTTCAGAAGTGATGGAACATAGCTGTTCACGAGTTCCATGTGGCATTTGGAGCTATGGGC
TTTCGGTTTTTGCTTTGCTTTGTTTTCCAAGTCACGACTGGGTGTACCATTCTTGTAGCAAGCAGAAACA
TCTCAGCATGGAATGAGTATTTTTTATGCAAAAGCAACCTGCAGACTTATAATTACCATTATTATGTGGG
TTCCACAGACTTGTGGCCTCTGCTTGAGCATTAAACACGTATGAACAGATTGTTCCGGCATCTAAAACAA
ATGTGTTCTTGTGTGTGCATGCATGTGTGTATGACCGTGCTTGTGTACACGTGCGTGCATGTGTGTGTGT
TCCCCCCGACCCCCCGCCCTGACCCCCAATATAGCAAGAAGCAAAGGCAAGCCTACATTCGTATGGGAAC
ACTGGCTCGGCGGAGGTCTGACTGCGTGGGGCTTTAATTGATTTGTGGCTGTGATAGGCGAGTCTTCAAG
GAGCCTTTTGTTCTTTTTCCCACAATATAAAAATCTGACTACATTCTGTTGAGAACTTTTCTCTGTTTCC
TTTTATACAAAAAAAGGTCAGTTCCTGGCATGGTGCCCTGACTGCTTGGTGAGCAAGACGAAAGAAAGTC
AAGAAATTTCCATTCCGCCCATTTGGGTTTGTGTGAAATCGAGTGTAAATTCGGCCGCTGCCTAGCTCCC
TCTCTCAGGGGCCAGTGCTTACCCGTTTCTGGGGGTTGTTTCAAAGCAAATAAATAAATCCTAGAAGTAT
GTCTGTCCTGCCTCTTCCTAACCTCTCCCCTGTGAAATACTATTGCCCAGGTCCAGGTGAAGGCCGTGCT
GGGCCACCTCCTGGCAATGTCCAGAAGCAGCAGCCTCTCAGCCCAGGACCTGCAGACGGTAGCAGGACAG
GGCACAGACACAGACCTCAGAGCTCCTGCACAACAGCTGATCAGGCACCTTCTCCTCAACTTCCTGCTCT
GGGCTCCTGGAGGCCACACGATCGCCTGGGATGTCATCACCCTGGTAAGTCTCCCTGTGGTCCAGCATCC
TAGTACTCATTTCTGCTCCAGGCGAGAGGTGGGTTACCTGTCCGAGGGTCTGGCCTCTGCACAGTGTGTG
TACCAGGATGCTGCCCAGCACAGATAAATGGTCAAGGAGGTTGACAGCTGGGATGGACCCCAGAGCCTGC
CCCTTCCAGCACCTTTATGTCATAGAAGAGAAAACAGAGGCTCAGAGACAGGAGATGCCATCTCCTGGGC
CCACGGCTTGCTGCCAAAGCCTGCGGTAGAAGCCAGGTCTCCTGTCCCCCTACGTACATTTCTTTCCATC
GCAGTGTGCTGCTCTCCTCCTCCTCATGGAAAGAAGTAAGGCCACGATGAGAATGGGCTCGCAAAGCAAC
CACAATGCTATTCACTGCAACAGTGCAAAGAATTCTGTTAATCTTTAAAAAAATTGGTTTATTACAAAGA
AATCCTTCCTGAAGCCCACTTGACTTGAGGGGTAAAAAACGGTCCAAGTCAAAAGTGAGCACTCTTTGTG
ACATTAGATTTGGCAATGATTTCTTGGATATGATACCAAAGGCACAGCAATGAAAGAAAACAATAGATAA
ATTGGACTTTATGAAAATTAAAAGCTTTTGTGCATCAAATGATACTGTCAAGAAAGTGAAAACACAATTC
ACAGAATGGGAGAAAAATATCTGGAAATAATATATATGATTAGAGTTTAGTATTCAGAATACATAAGGAA
TTCTTATAACTCAACAACAAAAAGATAAACAACCCAATTCAAAAATGGGCAAAGGACTTGAACAGACATT
TCTCCAAAGAAGATGTACAAATGGCCAGTAGGCATGTGGGGAGATGCTCACAGAAAGGGCATGAGTGGTC
AGGGAAAGGCAAAGTGCAGCGAGATGCACTGCACAGCCATCAGGATGGCTGTCAGCAAGGAGAGAAAAGA
AACGCCCGTGAGGATGCGTGGGAACCGGAACACTCATATGCTTCCCGGTGGGGACATTAACGTCGTGCAG
CTACTGTGGAGAAGAATGGGGTGGTTCCTCAAACAGCCAAACTTGGAATTACCATGTGGCAGGCAGTTCT
CCTAGGTCTATAACCCAGAGAGCCGAAAGCAGGGGCTGGAGGGCCATCTGGCCCAGTGCTCAGGGCAGCA
CTATTCTCAGCAGCCAGCAGGCAGAGATGGCCTAAACGCCTGTAGAGGGACAAGCAATGCACCGTGTGAT
CTGTACCCACAAGAGAGTACTGTTCAGCCTGAAGATGGAAAGAGGTTCTGACAGTGCTACAACATGAATG
AACCTGGAAGACACTGTGCTGTTGAAATAAGCCAGAAACGAGGATGTTGTATGAGTCACTTAGGTGAGGC
ACCTGGAAGAGTCAAGTCCAGGGAGAGGAAGTGCTAGAGTTTCCCAAGGCAGAGGGTGGGGAGTCAGTGT
GGGGATCATGGAAAGGGGCAGGAGACGGCCAGTGCTGATGGCTGTGCAACACTGTAAACATACTGCATGC
CACCAAATTACACAAATGGGTAAAACAGCACATTTTATGTATATTTTACCACAATTTAAAAAAATACTCA
TCTCAGAAAAAGCACCAGCATGCTGGCTCTGGGAGTTTTGTTTTATTTTTTATTTTATTTGTACTTTTGT
TGACATATACATACAGAAAATACACAGCTTGATGAATTTCACAAACCAACAACACCTGTGCAGCCAGCAG
CCAACTCGAGAGGAATATTCCCAGTCCCCAGAGGCCCCTCCTGCTCCCGTCCAGGCCGGGCCTGACTGAA
ACGTGAATGTCCATGTACAGAAAGTCCCCGTAACATGACCCACCTGCCAAGAACCAGGGCCAGGAGATTG
TCTCCATCCTGGTAGGACAGTCCTGTGGAGTGGGCCCAGGCTGTGCCTCCCAGGTGCTGGTGTCTCAGCT
AAGACGAATCCGAGTCATGAGGGTGGCCCAGGGCTAAAGACGACTGGCTGCCACATGCCAGGTGCCACCT
CTTTGGGCCCGGCCCCAGCACAGCGAGAATGCTTTCGAGAATCTATTGTGTACTCTTATAAAATGCACAC
CTGCAACAATGCGGCCCAACCTAGAGGGCTTTACACTGAGCGAAATAAGCCAGACGCGAGAGACAAATGC
ATGCTCTCACCTATGGGTGGGATCTAAAAAGTCGAACTCACAGAAACAGTGGGAAGGTGCTTATGGGGGG
CTGGGGAGGGGCAGTGGGGAGATGGTCAGCCCTGCCCTGTGACAAGGACAATTCCAGCTCAGGCACTTCC
TCCCCAACCCTGTGGCCCGTGTGAGTGGAGAAGGCTTAGCAGCAGGGGTCAGCGTGGGAGTTTGGTGACT
CCAGCCCTGCCGACAGGGTGTGAGAGAAAATCACCCAGAGCAAGCACCCTAGAGACACCCAGGTCTCTGC
TTCAGTTATCCTGATGCCATGTTTCCATCTACTCGGAGGAAACTTTCAGTCCACATTCAAAGCAGATCGC
CCTCAAGACTGGGCCCAGAGACATTGCTGGGAGTAAGCCAGATGCTGCAAGGGCCAGCCTGCATCCTGTG
TGGGGCAGTCCCTCCTGACACGTGGTTCAGCCCCTGCTGCGGATCCACACGGGAACCCTCAGGAGCACAG
AGGGCCCCAGTGCTTTGTCATCACATCCCCCAAGTCAGTTCCGCCACAGAGAAGACACACACAGCAGAAG
CCCATTCCCAGAGCAGACGCCAGTGTGGCGCTCATGCACTGACTCTGTCAGGGACGGATGCTGGCCATCT
GGGCACCCATCGTGGTGAAAGCACCTCCTGGGGGCTGTCCTTTCGGATGTTTTGAAACCATCTTTATTGA
CACGTCAGTCTTCCTAATGAGAAGCCTTCGCTGCGGTGGCCGCGTGGCAGGGAGGGCCTCTGGGGAAGGA
TCCCTCCCACCACCCCTGCCTCTCCTGGCCTTTGTCAGTTCCTCTGCCGACAGCACCTTGGAAAGAGCCG
GGTCTGCTTGGCCCACGAGCAGGTGGTGGCCAGATGGTTGCTTTGGTGGGACGGCCTTTCCCTCCTACAG
CTTGGGTCTCTCCACCCTCAGGACCTAGCACGAGCGCAGCCACCTCCCAGCTGGTCCCAGGCTCTGCCCT
CTATCTTGGCATCCAGATTTGGAGAGCAGTGCCAGCTCAAGGCAAAGGCCACTATCTCTCTTCAGAGCCC
TTGCACCCTCTTGGAGATGGCTTGAGCGAGTGGCTCCATCTGACCTAAAGGACGCACTGGTCCTGCAGCC
CCATCTGCCCACAGCCTGCCTCCTGTGTGGCCTCTGCAGTGAGCTCTGCGCAGTGGGCTCTTCTCCAGGC
ACCTGGAGGCCCACTCCCCGGCTGTCCCGGAATCCTCTTCTCTGACCTCGGCCCTCCGATTTTCCCCAGA
ACGCCATCCATGAGGCCCTGCCCAACGTCCCTGCGGTTCTCCTGCCTCTCTGGCTCCTGGCCTCTCGCCA
GGCACTCCTCTGCCTTGCCCCAGCCGTCCACTTGCTCCCTCACTTGTGCCTGCAGGAGGCCGGCACAGAG
CAGAGGACTGCATGGAGTCCACCCCTGGGGCTCCACCTCCTGTCCTGTCCTGGATTCACACTTCTCCTTC
TCCTGCCTCCTGCTGCTGGGCCACAGCAACAACAGCAAAAGTTAGCTAGATTCCGAGATGCAGAGTTCAA
TTCTGTAGTCGTTGAACTCAAAATGAATTGAACCCACTCTTGGTGCACCAGCCAAGGCCAGCAGGGAGGC
AGGTTTTCCAGGCGGCTGCAGGGCTGCGAATTTTTGCATGTGACTAGAGAGCTGGGAAGGGGCCCACCCA
GGAGTGTTGGTGTGTAAGGAAGATGCAAGGTTGGATTTGTAATGACAACTCGGCCTTTCTTCAGACATGG
CCAAGCCCATCAGCATGGGCATGGCCAGCCCCTGAGCGGGGGACAGTCCTCCCGCTCAGGGTCTGGGTGG
TATATTAACTGAAAGGGGTCCACAGCAGGCTCACATTGTTTCCTTGATGAAGGACAGGCTGCATCTACCG
AAGGCCATCAGCACTATGTGCCTGTCATTTCTGAGTAAAAACCAAGTGATAGCAATACAGACGCCCAGGG
ACACACTGGCACGTGCCTGGGCTACAGCCGGAGCCCCCGTGCTGGCTGCACTGACCCTGGCGGGCTCGTT
GCAGGCCGGCTGCAGGCCCTGTGTGCTGCCAGGGGGGGCCGAGGAGAGCGAACGTCATGGTCCACACCAC
GTCGTTTACTCTTAGCTCTGCGTCCCCACGCTGCCATTCACACAGTGCGCATGCGACAAGAGGCTCCCTT
TAGTGGTGGTCAGGAGGTGGAAGGCCCAGTTCTGAAGGGTGTCCTGGGCTGTCGGACCTGAGGCAGTAAA
ACCAGAATAGTCCTGGGAAAACCAAGGCAGTTGTTCACCCTCCCAGAACGGCCCAACCCTTCCAGAGGAA
GCTGACCTTGGGCTGCTCTGGCTAATTAAACATTTGCGGGTTCTGTATAAACTGACACACACTAAGTGAA
TATATCGGTTACTCTTTCAAAAACTTAAGCCTTCTTAATACTGCTTGTGCTTAAAGAACCATAAATTCCC
CACACAGCTAAATTGTAAGATTCTCACCCTTCCCTTTTTTCTTAACCGAAGTTTTTAGGAAAATACTTAC
AGGCACCAACAAGTACGAATGCCTTGAGGCTGTGTCTCCTGCTCTCCCGCAAGAATCAGGTGTTAAAACC
TTAGAGGCCTATTAAAAAGCAAGTAGGTCCGGTTGCTAGCCCAGGGATGCCAGGGGCTGTTTCTGTGAAA
ACAGGTGGTATTTTCCAATTCTCATGTTCGTGTGAGCCTTTTGCAGAAAGTCAAGCCACAGCATGCTCAT
TTGCCTTTGTTCCCCACAGTGGATCATCCCACAACTTGTGACTGGCATTCTGAGAAGCACTTCTGATTGC
AAGCAGCGCTTGTTTGTGGCCTTTATGAGTCTAAGGCTGTTGGCAGCTGAGCTCAATGCGAGGAGGCTCG
TTAGGAAATGGCACCGCTCACTGTGTAGCCAGCCTTGGAGACAGACTTGCTATGCTAATCACCTTGCAAA
CTAGAGCCCCTGATGCTTTACTTTGGAACTGATGGAAATGCTGGATAGGGCTTCTTTCAGGGACTGGGTG
GTTATGGTCCGTCCCTGGACAAAGGACAAATCTGTCTGGAAAGTGTTTTAATTTGCCTTCTCTTCTGTCC
TGATTGCAGATGGCTCACACTGCTGAGATAACTCACGAGATCATTGGCTTTCTTGACCAGACCTTGTACA
GATGGAATCGTCTTGGCATTGAAAGCCCTAGATCAGAAAAACTGGCCCGAGAGCTCCTTAAAGAGCTGCG
AACTCAAGTCTAGAAGGCACGCAGGCCGTGTGGGTGCCCGGCGTGAGGGATCAGGCTCGCCAGGGCCACA
GGACAGGTGATGACCTGTGGCCACGCATTTGTGGAGTAAGTGCCCTCGCTGGGCTGTGAGAATGAGCTGT
ACACATCTTGGGACAATCTGCTAGTATCTATTTTACAAAATGCAGAGCCAGGTCCCTCAGCCCAGACTCA
GTCAGACATGTTCACTAATGACTCAAGTGAGCCTTCGGTACTCCTGGTGCCCGCCCGGCCAGACCGTCAG
CTTGATAATTACTAAAGCAAAGGCCTGGGTGGGAGAACAGGTTTCTAGTTTTTACCCAAGTCAAGCTGCA
CATCTATTATTTAAAAATTCAAAGTCTTAGAACCAAGAATTTGGTCATGAACCATTAAAGAATTTAGAGA
GAACTTAGCTCTTTTTAGACTCTTTTTAGGAGTCAGGGATCTGGGATAAAGCCACACTGTCTTGCTGTAT
GGAGAAATTCTTCAAGGGGAGTCAGGGTCCCTCAGGCTTCCCTTGTGTCTCCCTGGACCTGCCTGACAGG
CCACAGGAGCAGACAGCACACCCAAGCCCGGGCCTCCGGCACACTCTTTCCACTCTGTATTTGCTAAATG
ATGCTAACTGCTACCAAAAGGCCCTTGGGACATCAGAGGAGCCGGCAGGCGAAGGTAGAGGATGTGTTCC
AGAAACATTAGAAGGCAGGATTAATTCAGTTAGTTAGTTCTCTTGTTAAATGGAAATGGGAATTGGAAAT
TCCTGATAAAGAATTGGCCTGGCTGGGTGCAGTGGCTCACACCTGTGATCCCAGCACTTTGGGAGGCCAA
GGCAGGGGGATTACTTCAGCCCAGGAGTTCCAGACTGCCTGGCTAACATGGCAATACCCTATCTCTACTA
AAAATACAAAAATTATCGGGGTGCAATGGCATGCATCTGTAATCCCAGCTATTCAAGAGGCTGAGGCATG
AGGATCTCTTGAACCCGGGAGGTGGGAGTTGTAGTGAGCCGAGATCATGACACTGCACTCCAGCCTGGGC
AACAGAGCGAGACCATCTCTTAAAAAAAGGCATTGTTAGTGTAATCTCAAGGTTAACATTTATTTCATGT
CAGTACAGGGTGCTTTTTCCTTTCAGGGACATTCTGGAATTGTATTGGTTGTACATTCTTTTGTGTCTAT
TCTGTTTGTCAAGTGAGTCAAGACTTGCTTTTGTCCATTTTGATTTGTGTGTATTAGTCTGAGTCTTGGC
TCCGTTTTGAGGTATGAGCAAAGTTTTGCTGGATTAGAAGTTAACCTTTAGGGAAATTCCTTATTTTGGT
ATGTGGCAATGCTAATAGATCCACTGAAGATCTGGAAAATTCCAGGAACTTTTCACCTGAGCCTTTCTTC
TGAGAAATGCTGCAGTCAGAAGGGTGTGCTGGTAAAGTATTTTGGTGGCAGCTGCCATCATGGTCATTGC
CTTCATATAACATGCTTCGTGCTCATGGTCATTGCCTTCATATAACATGCTTCGTGCCATCATGATCCTT
GCCTTCATATAACAAACATGCTTCGTCAGAGGTGTTGGGGTTGAAAAAGGAGCTGCATGCTTCACTGGAG
TTGAGGGCCTCTCTCCTGTTCTGACTTTAAGCCAGAACTTGTGGCTGGGCCATGGAAGCTGTGACTCCTC
TGTGGACATGGTGGCAGCAGGGAACCCCTAGAGAGAGGGGCCACTGGGACCAGGCCTCCTGTTGTGGAGG
GACTCCTGGGACAGTCCTCCACCCTGTCCTGTGGTCCTGTGTACAGGGTTGGCCTCTTCCTCCTCCCCTG
CCAGGCCTCTGCCCATGCCCCTTCCTTCCTTCTCCTGGGACTGGTGAAGCTAGGCATCTGGAAGACTTCT
TCCTAGCCTGGAAGCCCTGACCTCGGCCCATCTGCAGAATCTCCCAGTTCCTTCACAGCTGCCGAGTCCT
CTCACGGGTGCGGTGGAGGCGGCCTTGCCGGTGGTGCTTTCTGGGCAGCCAGGGGTTCCTGGGTGGGAGG
ACTGTCCCTCTGGGGACGTGGCACTGAAGTGCCTGCTGGCTTCATGTGGCCCTTTGCCCTTTCCCAGCCT
GAGAGATGCTCAAAGGTGGGGAGCTGGGGGAGCCACCCCTCGGCCATTCCCTCCACCTCCAAGACAGGTG
GCGGCCGGGCAGGCACTCTTAAGCCCACCTCCCCCTCTTGTTGCCTTCGATTTCGGCAAAGCCTGGGCAG
GTGCCACCGGGAAGGAATGGCATCCGAGATGCTGGGCGGGGACGCGGCGTGGCCGAGGGGGCCTTGACGG
CGTTGGCGGGGCCTGGGCACAGGGGCAGCCGCAGGGAGGCAGGGATGGCAAGGCGTGAAGCCACCCTGGA
AGGAACTGGACCAAGGTCTTCAGAGGTGCGACAGGGTCTGGAATCTGACCTTACTCTAGCAGGAGTTTTT
GTAGACTCTCCCTGATAGTTTAGTTTTTGATAAAGCATGCTGGTAAAACCACTACCCTCAGAGAGAGCCA
AAAATACAGAAGAGGCGGAGAGCGCCCCTCCAACCAGGCTGTTATTCCCCTGGACTCCGTGACATCTGTG
GAATTTTTTAGCTCTTTAAAATCTGTAATTTGTTGTCTATTTTTTCATTCTAAATAAAACTTCAGTTTGC
ACCTAATGTTGTATCCATTAAATATTACAATCCTTCTCTCAGGAAAAAGCTCCCCCGATGGCCCCAGACA
GTGGAAGCTTCGGGCCTCAGGAAACCTAGATGTGCCCTGGAAGAGACCGAGGATGGCTTAGCCTCTGGGC
CTGGGAACCTTGCTACTAAATACCTAAAAACTAAGGGTCCTGTCACCAAGGAGGAAGCAGGAGGACAAGG
GCAGGCATCTGGCAGGGCCTGCCAAGATCAGGTTACATGCGTTTCATATCTGTGTTTTCTCTAAGCCAGG
CTTGACCATAAGCCTCACTTGAATTGTTCTGTCTCTTCCCTGATCCCTGAAGCTGAAGGCCTCGTCCCAC
CAGCATAGCCCACCCACTCTTGCTCGCTCCGTTGCTTCACAGGCTGCTGTCCCCTCCTCCAGCCCCACAG
GCCCCTCTGGGAGGCATGAGTGATGCGGCCAAGGCGAGCAGCGCCGTGGCCACCCCCAGGACCCCCACTG
CAGTGGGGTTTCCAGCACTCCCCATGCTTCCGGCTATGGGACACTAGGGCCCCTCTCGGGGTCAGGAGGG
CGCCTGAGGGAGCAGACAGGAAATGCTAAGACACTCCTGAGGAGCCTCTCACTGGAGCAGCCATGGTTGG
CAGGGTTTCGTGGTTTGTTCTTCACCCTGTCCTGCCTGGTGTCTAAGTGGTGGGACAAGGTGCTAGGACA
GAAATGGGAGCTAGGACAGAAATGGGAGCTAGTCCAGGGGATGGGAGGAAGCCGAGTTTTCTGTTGAAGT
GGAGAAGTTACGAATGGGGTCTTGACAGGGAAGCCAGAGAAGAAGGGACCTTGGTGAGCCTGGCAGAGTG
AATCCACCCAAAATGCTGGGAAGTCAAAACCGAGCCTGGCCTTACGCTGCCCAGAGGACGGCGGATGCAC
TGGAGGATTTGCACAGTGGGAGCAAATGTGAGGAATGTTCTCCTTATTCAACAAGGAATCCAAAATTTTT
TTGCTTTCCAAGGAAGAAGAGAAACAGTTCCCCGTGCTTCTCCCCTCGCCTTTTTCTTCCTCTGTTTCCA
GCCCAGGACCACCTCCCCCAGCCCGGGGGCTCGGGTGCTAAAGTTCTTCCCTCTGCCAAATGTTGGGAAA
TCCGTAGATTTTGTCGAAAAATCCTAAGTCATTAATCATCGCTAAGCCATTTTACAACCAAAGAACAAAA
ATTAAGATACAGTAAGTACATAACATGTCTTCAAGCCTCCTCCTAAAATCCAGTTCCACAATTGGTTTAT
ACCATGGGTCCAAATCACACCCCTCAAGCCCAAACTGGTAATGGAGAGCTCATAGCAAAGGCCTTCCCTC
CCGCTCCTGTCATGGTGTCTTACTGCACTTGCTGTTCTGGGCAGGGAATTTGTTCACCCAGGACTTTTGG
TTGCAAGCAACAGAAACGTGCACTGAATGCTGAAAGTAAAGGGGAACTGATGAAAAAGGTATTGGGCTGA
TGAGGCCTGGTGTGAGCCGGCCAGCAGCAGTCCCAGCCTTGCTTCAGATGCTCTGGCAAGGCCAGTCGTG
CTGCCCAGCCCTTCCGGACCCCACTCCAGCCGGGAGAAAGGCCCTTGTGCCCACTCCTTTCCACACCCCT
GCCCAGGTGCATCAGATGGAGGAGCCTGGGTCAAAGGCCTGCCAGGGATGCTAGGAAATCACGCATCTGG
CTTCAGCTTCTTTAACGTTATTGGGTACCTTGGATACCACCAAAAGCATCACCCAACTACAGGAAGGGGC
CAAACACTGGGCAAATGGAGACAATAAAAATGTCTCCAGCTCATTACAGCATCTATACTTTAGCCTATGC
CAGAGCATTTTAGAAGGTTGCGTCCCATGAAACAGCCCAGCAGCCAGCACCAGAACAGGCAGAGGTGAGC
CTTTTCAGAAAGATGTTTTGTAGGCACCTAAATCTGGGTTTCTTAAATGCAGCACCATGAGCACTTTGGA
CCAGATGCCTCCCTGTTGTGGGGGTGTCCTGTGCACTGCAGGGTGT

### Examples

[0493] The following examples are provided for illustrative purposes only and are not intended to limit the scope of the claims provided herein.

### Example 1. General Methods

[0494] PEgRNA assembly: PEgRNA libraries (and ngRNAs) may be assembled by one of three methods: in the first method, pooled synthesized DNA oligos encoding the PEgRNA and flanking U6 expression plasmid homology regions may be cloned into U6 expression plasmids via Gibson cloning and sequencing of bacterial colonies via Sanger or Next-generation sequencing. In the second method, double-stranded linear DNA fragments encoding PEgRNA and homology sequences as above may be individually Gibson-cloned into U6 expression plasmids. In the third method, for each PEgRNA, separate oligos encoding a spacer, a gRNA scaffold, and PEgRNA extension (PBS and RTT) may be ligated, and then cloned into a U6 expression plasmid as described in Anzalone et al., Nature. 2019 December; 576(7785):149-157. Bacterial colonies carrying sequence-verified plasmids may be propagated in LB or TB. Plasmid DNA can be purified by minipreps for mammalian transfection.

[0495] Alternatively, PEgRNAs (and ngRNAs) may be chemically synthesized. The PEgRNAs and ngRNAs may be modified at the 5′ end and the 3′ end: the three 5′ most nucleotides may be modified to phosphorothioated 2′-O-methyl nucleotides. The three consecutive nucleotides that precede the 3′ most nucleotide (i.e. three consecutive nucleotides immediately 5′ of the last nucleotide at the 3′ end) may also be modified to phosphorothioated 2′-O-methyl nucleotides.

### HEK293T Cell Culture and Transfection:

[0496] Strategy 1: HEK293T cells may be propagated in DMEM with 10% FBS. Prior to transfection, cells may be seeded in 96-well plates and then transfected with Lipofectamine 2000 according to the manufacturer's directions with DNA encoding a prime editor fusion protein and PEgRNA (and with ngRNA for PE3 editing strategy). Three days after transfection, genomic DNA (gDNA) can be harvested in lysis buffer for high throughput sequencing and sequenced using MiSeq.

[0497] Strategy 2: Alternately, HEK293T cells may be propagated in DMEM with 10% FBS. Prior to transfection, cells may be seeded in 96-well plates and then transfected with Lipofectamine MessengerMax according to the manufacturer's directions with mRNA encoding a prime editor fusion protein and synthetic PEgRNAs with or without ngRNAs. Three days after transfection, gDNA can be harvested in lysis buffer for high throughput sequencing and sequenced using MiSeq.

[0498] Lentiviralproduction and cell line generation: Lentiviral transfer plasmids containing the IVS4+4 A->T mutation or the 322delG mutation with flanking sequences from the FANCC gene on each side, and an IRES-Puromycin selection cassette, are cloned behind an EF1α short promoter. HEK 293T cells may be transiently transfected with the transfer plasmids and packaging plasmids containing VSV glycoprotein and lentiviral gag/pol coding sequences. After transfection, lentiviral particles may be harvested from the cell media and concentrated. HEK 293T cells may be transduced using serial dilutions of the lentiviral particles described above. Cells generated at a dilution of MOI <1, as determined by survival following puromycin, may be selected for expansion. A resulting HEK293T cell line carrying the IVS4+4 A->T mutation or the 322delG mutation can then be used to examine PEgRNAs designed to correct the mutations.

[0499] Installation of IVS4+4A->T mutation or 322delG mutation in human FANCC gene by prime editing: Prime editing guide RNAs (PEgRNAs) may be designed to incorporate a IVS4+4A->T mutation or a 322delG mutation in a wildtype human FANCC gene in HEK293T cells. Briefly, plasmids encoding U6 promoter-driven pegRNA expression cassettes and prime editor fusion protein are co-transfected into wildtype HEK293T cells as described above. Seventy-two hours after transfection, gDNA is harvested for high throughput sequencing and may be analyzed using Miseq. Frequency of the installation can be used as a proxy to examine prime editing efficiency. The resulting HEK293T cell line that carries a 322delG or a IVS4+4A->T mutation can be used to test PEgRNAs designed to correct the mutations.

[0500] Generation of clonal cell lines containing mutations in the FANCC gene: wild type HEK293T cells may be transfected with installation PEgRNAs and polynucleotide encoding a prime editor protein as described above for incorporation of the 322delG or the IVS4+4 A->T mutation. Editing efficiency of mutation incorporation may be determined with Miseq. To generate a clonal cell line homozygous for a mutation, seventy-two hours after transfection, HEK293T cells may be detached from the growth surface and plated at a limiting dilution to generate clonal colonies. After seven days of growth, single colonies are mechanically detached from the dish and transferred into separate wells. Once grown to near-confluence, cells are split into two fractions: fraction #1 is propagated while gDNA is harvested from fraction #2 for sequencing with Miseq. Clones that exhibit 100% editing of the target site (i.e. homozygous for the mutation) can be used to further examine prime editing correction of the mutation.

### Example 2. Spacer Screen for IVS4+4A->T Mutation in FANCC

[0501] Single guide RNAs (sgRNAs) that contain a spacer associated with a NGG, NGA, or NG PAM within about 100 nucleotides flanking the IVS4+4A->T mutation were examined for Cas9-mediated cutting activity in wildtype HEK293T cells. Spacers of the tested sgRNAs include potential PEgRNA spacers, potential ngRNA spacers, and spacers that can be used in both PEgRNAs and ngRNAs.

[0502] Briefly, one day prior to transfection, wildtype HEK293T cells were plated in a 96-well plate at a density of 10,000 cells per well. Before transfecting, cells were approximately 60-70% confluent. The cells were transfected with MessengerMax transfection cocktail containing an mRNA encoding a Cas9 protein capable of recognizing a NGG, NGA, or NG PAM, and a sgRNA containing a test spacer associated with a corresponding PAM. Three days post transfection, gDNA was harvested with QuickExtract Solution (Lucigen) and sequenced by next generation sequencing. Sequences of the sgRNAs, tested spacers, and the results are summarized in Tables 63 and 64.

TABLE 63
sgRNA sequences used in spacer screen

| SEQ | | |
|---|---|---|
| ID | | |
| NO. | Description | Sequence |
| 3566 | sgRNA | GCACCTATAGATTACTATCCGTTTTAGAGCTAGAAATAGCAAGTTAAAATAAGGCTA |
| | | GTCCGTTATCAACTTGAAAAAGTGGCACCGAGTCGGTGC |
| 3567 | sgRNA | CTCTTTTCACTCAAGGTCTTGTTTTAGAGCTAGAAATAGCAAGTTAAAATAAGGCTA |
| | | GTCCGTTATCAACTTGAAAAAGTGGCACCGAGTCGGTGC |
| 3568 | sgRNA | GAAGTTGCTCTTTTCACTCAGTTTTAGAGCTAGAAATAGCAAGTTAAAATAAGGCTA |
| | | GTCCGTTATCAACTTGAAAAAGTGGCACCGAGTCGGTGC |
| 3569 | sgRNA | TCCTGGTTTGCTTAAAAATGGTTTTAGAGCTAGAAATAGCAAGTTAAAATAAGGCTA |
| | | GTCCGTTATCAACTTGAAAAAGTGGCACCGAGTCGGTGC |
| 3570 | sgRNA | GGTCTTGGGTATGCACCTATGTTTTAGAGCTAGAAATAGCAAGTTAAAATAAGGCTA |
| | | GTCCGTTATCAACTTGAAAAAGTGGCACCGAGTCGGTGC |
| 3571 | sgRNA | AGCATTAAACATTTCAAAAGGTTTTAGAGCTAGAAATAGCAAGTTAAAATAAGGCTA |
| | | GTCCGTTATCAACTTGAAAAAGTGGCACCGAGTCGGTGC |
| 3572 | sgRNA | TTTCCATTTACTCTTTTTGCGTTTTAGAGCTAGAAATAGCAAGTTAAAATAAGGCTA |
| | | GTCCGTTATCAACTTGAAAAAGTGGCACCGAGTCGGTGC |
| 3573 | sgRNA | CTGGTTTGCTTAAAAATGTGGTTTTAGAGCTAGAAATAGCAAGTTAAAATAAGGCTA |
| | | GTCCGTTATCAACTTGAAAAAGTGGCACCGAGTCGGTGC |
| 3574 | sgRNA | CACCTATAGATTACTATCCTGTTTTAGAGCTAGAAATAGCAAGTTAAAATAAGGCTA |
| | | GTCCGTTATCAACTTGAAAAAGTGGCACCGAGTCGGTGC |
| 3575 | sgRNA | TATAGATTACTATCCTGGTTGTTTTAGAGCTAGAAATAGCAAGTTAAAATAAGGCTA |
| | | GTCCGTTATCAACTTGAAAAAGTGGCACCGAGTCGGTGC |
| 3576 | sgRNA | TTTTTGCTGATGGCACATTCGTTTTAGAGCTAGAAATAGCAAGTTAAAATAAGGCTA |
| | | GTCCGTTATCAACTTGAAAAAGTGGCACCGAGTCGGTGC |
| 3577 | sgRNA | TCAGCATTAAACATTTCAAAGTTTTAGAGCTAGAAATAGCAAGTTAAAATAAGGCTA |
| | | GTCCGTTATCAACTTGAAAAAGTGGCACCGAGTCGGTGC |
| 3578 | sgRNA | GCACCTATAGATTACTATCCGTTTTAGAGCTAGAAATAGCAAGTTAAAATAAGGCTA |
| | | GTCCGTTATCAACTTGAAAAAGTGGCACCGAGTCGGTGCTTTT |
| 3579 | sgRNA | CTCTTTTCACTCAAGGTCTTGTTTTAGAGCTAGAAATAGCAAGTTAAAATAAGGCTA |
| | | GTCCGTTATCAACTTGAAAAAGTGGCACCGAGTCGGTGCTTTT |
| 3580 | sgRNA | GAAGTTGCTCTTTTCACTCAGTTTTAGAGCTAGAAATAGCAAGTTAAAATAAGGCTA |
| | | GTCCGTTATCAACTTGAAAAAGTGGCACCGAGTCGGTGCTTTT |
| 3581 | sgRNA | TCCTGGTTTGCTTAAAAATGGTTTTAGAGCTAGAAATAGCAAGTTAAAATAAGGCTA |
| | | GTCCGTTATCAACTTGAAAAAGTGGCACCGAGTCGGTGCTTTT |
| 3582 | sgRNA | GGTCTTGGGTATGCACCTATGTTTTAGAGCTAGAAATAGCAAGTTAAAATAAGGCTA |
| | | GTCCGTTATCAACTTGAAAAAGTGGCACCGAGTCGGTGCTTTT |
| 3583 | sgRNA | AGCATTAAACATTTCAAAAGGTTTTAGAGCTAGAAATAGCAAGTTAAAATAAGGCTA |
| | | GTCCGTTATCAACTTGAAAAAGTGGCACCGAGTCGGTGCTTTT |
| 3584 | sgRNA | TTTCCATTTACTCTTTTTGCGTTTTAGAGCTAGAAATAGCAAGTTAAAATAAGGCTA |
| | | GTCCGTTATCAACTTGAAAAAGTGGCACCGAGTCGGTGCTTTT |
| 3585 | sgRNA | CTGGTTTGCTTAAAAATGTGGTTTTAGAGCTAGAAATAGCAAGTTAAAATAAGGCTA |
| | | GTCCGTTATCAACTTGAAAAAGTGGCACCGAGTCGGTGCTTTT |
| 3586 | sgRNA | CACCTATAGATTACTATCCTGTTTTAGAGCTAGAAATAGCAAGTTAAAATAAGGCTA |
| | | GTCCGTTATCAACTTGAAAAAGTGGCACCGAGTCGGTGCTTTT |
| 3587 | sgRNA | TATAGATTACTATCCTGGTTGTTTTAGAGCTAGAAATAGCAAGTTAAAATAAGGCTA |
| | | GTCCGTTATCAACTTGAAAAAGTGGCACCGAGTCGGTGCTTTT |
| 3588 | sgRNA | TTTTTGCTGATGGCACATTCGTTTTAGAGCTAGAAATAGCAAGTTAAAATAAGGCTA |
| | | GTCCGTTATCAACTTGAAAAAGTGGCACCGAGTCGGTGCTTTT |
| 3589 | sgRNA | TCAGCATTAAACATTTCAAAGTTTTAGAGCTAGAAATAGCAAGTTAAAATAAGGCTA |
| | | GTCCGTTATCAACTTGAAAAAGTGGCACCGAGTCGGTGCTTTT |

TABLE 64
Spacer screen for spacers near the IVS4 + 4A -> T mutation in
human FANCC gene

| PAM | Spacer SEQ ID No. | sgRNA SEQ ID No. | %Indel frequency |
|---|---|---|---|
| NGG | 2619 | 3578 | 34.50% |
| NGG | 2616 | 3579 | 30.90% |
| NGG | 2618 | 3580 | 31.40% |
| NGA | 2628 | 3581 | 7.49% |
| NGA | 2622 | 3582 | 2.23% |
| NGA | 2573 | 3583 | 0.09% |
| NGA | 2895 | 3584 | 0.10% |
| NG | 2617 | 3585 | 0.49% |
| NG | 2613 | 3586 | 2.47% |
| NG | 2624 | 3587 | 10.64% |
| NG | 2896 | 3588 | 13.67% |
| NG | 2569 | 3589 | 0.22% |

### Example 3. Installing IVS4+4 A->T Mutation in Wildtype FANCC Gene

[0503] PEgRNAs were designed to have a spacer having the sequence of SEQ ID NO: 2619, PBS length of 8, 12, or 14 nt, and RTTs for incorporation of the IVS4+4 A->T mutation in wildtype FANCC gene. For each installation PEgRNA, a corresponding PEgRNA would have the same spacer and PBS sequences, and a RTT sequence of the same length but designed to correct the IVS4+4A->T mutation. The PEgRNAs were assembled as described in the third cloning method in Example 1.

[0504] For PE2 editing strategy, HEK293T cells were co-transfected with a plasmid expressing a prime editor fusion protein and a plasmid encoding a PEgRNA for installation of IVS4+4A->T mutation in the FANCC gene, and gDNA was harvested for sequencing with Miseq as described in Example 1. A non-transfection control was included, where the HEK293T cells were not transfected with any PEgRNA or prime editor-encoding polynucleotide.

[0505] Sequences of the PEgRNAs, corresponding components, and editing results are summarized in Table 65. Indels were not detected in any of the samples tested.

TABLE 65
Prime editing for installation of IVS4 + 4 A→T
mutation in wildtype FANCC (PE2 system)

| | PBS | | | |
|---|---|---|---|---|
| | SEQ ID | PBS | RTT | |
| PEgRNA sequence¹ | No. | length | length | %editing |
| Non-transfection control | NA | NA | NA | 0.05% |
| GCACCTATAGATTACTATCCGTTTTAGA | 3094 | 8 | 27 | 0.11% |
| GCTAGAAATAGCAAGTTAAAATAAGGCT | | | | |
| AGTCCGTTATCAACTTGAAAAAGTGGCA | | | | |
| CCGAGTCGGTGCGGCTATACACACATTT | | | | |
| TTAAGCAAACCAGGATAGTAATC (SEQ | | | | |
| ID NO: 3812) | | | | |
| GCACCTATAGATTACTATCCGTTTTAGA | 3094 | 8 | 29 | 0.11% |
| GCTAGAAATAGCAAGTTAAAATAAGGCT | | | | |
| AGTCCGTTATCAACTTGAAAAAGTGGCA | | | | |
| CCGAGTCGGTGCGGCTAAATACACACAT | | | | |
| TTTTAAGCAAACCAGGATAGTAATC | | | | |
| (SEQ ID NO: 3813) | | | | |
| GCACCTATAGATTACTATCCGTTTTAGA | 3094 | 8 | 31 | 0.11% |
| GCTAGAAATAGCAAGTTAAAATAAGGCT | | | | |
| AGTCCGTTATCAACTTGAAAAAGTGGCA | | | | |
| CCGAGTCGGTGCGGCTTTAAATACACAC | | | | |
| ATTTTTAAGCAAACCAGGATAGTAATC | | | | |
| (SEQ ID NO: 3814) | | | | |
| GCACCTATAGATTACTATCCGTTTTAGA | 3094 | 8 | 33 | 0.09% |
| GCTAGAAATAGCAAGTTAAAATAAGGCT | | | | |
| AGTCCGTTATCAACTTGAAAAAGTGGCA | | | | |
| CCGAGTCGGTGCGGCTTTTTAAATACAC | | | | |
| ACATTTTTAAGCAAACCAGGATAGTAAT | | | | |
| C (SEQ ID NO: 3815) | | | | |
| GCACCTATAGATTACTATCCGTTTTAGA | 3098 | 12 | 27 | 0.09% |
| GCTAGAAATAGCAAGTTAAAATAAGGCT | | | | |
| AGTCCGTTATCAACTTGAAAAAGTGGCA | | | | |
| CCGAGTCGGTGCGGCTATACACACATTT | | | | |
| TTAAGCAAACCAGGATAGTAATCTATA | | | | |
| (SEQ ID NO: 3816) | | | | |
| GCACCTATAGATTACTATCCGTTTTAGA | 3098 | 12 | 29 | 0.05% |
| GCTAGAAATAGCAAGTTAAAATAAGGCT | | | | |
| AGTCCGTTATCAACTTGAAAAAGTGGCA | | | | |
| CCGAGTCGGTGCGGCTAAATACACACAT | | | | |
| TTTTAAGCAAACCAGGATAGTAATCTAT | | | | |
| A (SEQ ID NO: 3817) | | | | |
| GCACCTATAGATTACTATCCGTTTTAGA | 3098 | 12 | 31 | 0.10% |
| GCTAGAAATAGCAAGTTAAAATAAGGCT | | | | |
| AGTCCGTTATCAACTTGAAAAAGTGGCA | | | | |
| CCGAGTCGGTGCGGCTTTAAATACACAC | | | | |
| ATTTTTAAGCAAACCAGGATAGTAATCT | | | | |
| ATA (SEQ ID NO: 3818) | | | | |
| GCACCTATAGATTACTATCCGTTTTAGA | 3098 | 12 | 33 | 0.07% |
| GCTAGAAATAGCAAGTTAAAATAAGGCT | | | | |
| AGTCCGTTATCAACTTGAAAAAGTGGCA | | | | |
| CCGAGTCGGTGCGGCTTTTTAAATACAC | | | | |
| ACATTTTTAAGCAAACCAGGATAGTAAT | | | | |
| CTATA (SEQ ID NO: 3819) | | | | |
| GCACCTATAGATTACTATCCGTTTTAGA | 3100 | 14 | 27 | 0.09% |
| GCTAGAAATAGCAAGTTAAAATAAGGCT | | | | |
| AGTCCGTTATCAACTTGAAAAAGTGGCA | | | | |
| CCGAGTCGGTGCGGCTATACACACATTT | | | | |
| TTAAGCAAACCAGGATAGTAATCTATAG | | | | |
| G (SEQ ID NO: 3820) | | | | |
| GCACCTATAGATTACTATCCGTTTTAGA | 3100 | 14 | 29 | 0.08% |
| GCTAGAAATAGCAAGTTAAAATAAGGCT | | | | |
| AGTCCGTTATCAACTTGAAAAAGTGGCA | | | | |
| CCGAGTCGGTGCGGCTAAATACACACAT | | | | |
| TTTTAAGCAAACCAGGATAGTAATCTAT | | | | |
| AGG (SEQ ID NO: 3821) | | | | |
| GCACCTATAGATTACTATCCGTTTTAGA | 3100 | 14 | 31 | 0.10% |
| GCTAGAAATAGCAAGTTAAAATAAGGCT | | | | |
| AGTCCGTTATCAACTTGAAAAAGTGGCA | | | | |
| CCGAGTCGGTGCGGCTTTAAATACACAC | | | | |
| ATTTTTAAGCAAACCAGGATAGTAATCT | | | | |
| ATAGG (SEQ ID NO: 3822) | | | | |

[0506] 1. All PEgRNAs used experimentally contained a 3′ TTTT end adaptation, and further contained chemical modifications 3′ mN*mN*mN*N and 5′mN*mN*mN*N modifications, where m indicates that the nucleotide contains a 2′-O-Me modification and a * indicates a phosphorothioate bond.

[0507] Separately, PEgRNAs that have the sequences of SEQ ID NOs: 3816 and 3817 were also tested for PE3 editing strategy. Two ngRNAs having the sequence of SEQ ID NOs: 2899 and 2900 were assembled using the same method as the PEgRNAs. Sequences of the PEgRNAs and ngRNAs and editing results are summarized in Table 66. Indels were not detected in any of the samples tested.

TABLE 66
Prime editing for installation of IVS4 + 4 A -> T mutation in
wildtype FANCC (PE3 system)

| PEgRNA | ngRNA | ngRNA spacer | nick-to-nick | % editing |
|---|---|---|---|---|
| SEQ ID No.¹ | SEQ ID No.¹ | SEQ ID No. | distance | efficiency |
| 3816 | 2899 | 2886 | 108 | 0.19% |
| 3816 | 2900 | 2892 | 111 | 0.13% |
| 3817 | 2899 | 2886 | 108 | 0.22% |
| 3817 | 2900 | 2892 | 111 | 0.26% |

[0508] 2. All PEgRNAs and ngRNAs used experimentally contained a 3′ TTTT end adaptation, and further contained chemical modifications 3′ mN*mN*mN*N and 5′mN*mN*mN*N modifications, where m indicates that the nucleotide contains a 2′-O-Me modification and a * indicates a phosphorothioate bond.

### Example 4: Editing of the IVS4+4A->T Mutation in Human FANCC Gene Using Prime Editing

[0509] A clonal cell line homozygous for the FANCC IVS4+4 A->T mutation as described in Examples 1 and 3 is used for examination of correction of IVS4+4 A->T mutation. Alternatively, FANCC IVS4+4 A>T cell line generated by lentiviral transfection as described above can be used for examination of correction of IVS4+4 A>T mutation.

[0510] Exemplary sequences of PEgRNAs and ngRNAs are provided in Tables 35-52 for PE2 and PE3 editing strategies. The clonal HEK293T cell line carrying the IVS4+4 A->T mutation is transfected with polynucleotides encoding a prime editor fusion protein, a pegRNA (PE2 editing strategy) and optionally a ngRNA (PE3 editing strategy) as described in Example 1. Seventy-two hours after transfection, gDNA is extracted and editing efficiency is determined by Miseq as described in Example 1.

### Example 5: Editing of the 322delG Mutation at the Endogenous FANCC Genomic Site in HEK293T Cells Using Prime Editing

[0511] A homozygous HEK293T cell line that carries the 322delG mutation in FANCC was generated in accordance with methods in Example 1 using PEgRNAs that encode the 322delG mutation in the RTT. PEgRNAs designed for correction of the 322delG mutation were chemically synthesized by Integrated DNA Technologies (IDT). The synthesized PEgRNAs were chemically modified at the 5′ end and the 3′ end: the three 5′ most nucleotides were modified to phosphorothioated 2′-O-methyl nucleotides. The three consecutive nucleotides that precede the 3′ most nucleotide (i.e. three consecutive nucleotides immediately 5′ of the last nucleotide at the 3′ end) were also modified to phosphorothioated 2′-O-methyl nucleotides. For PE2 editing strategy, HEK293T cells were co-transfected with mRNA encoding a prime editor fusion protein and a PEgRNA, and gDNA was harvested for sequencing with Miseq as described in Example 1. A “mock” non-transfection control was included, where the HEK293T cells were not transfected with any PEgRNA or prime editor-encoding polynucleotide.

[0512] A total of 95 PEgRNAs were tested, each containing a spacer having the sequence of SEQ ID NO: 35,139,212, or 213 (nick-to-edit distance 7, 1, 16, and 28nt, respectively), and a PBS of 8 to 14 nt in length. Each of the PEgRNA RTTs tested encoded for an insertion of G or C at the position corresponding to the c.67 (322delG) deletion to correct the deletion. 23 of the tested PEgRNAs also encoded for a synonymous AGG to AAG PAM silencing edit, as indicated in Table 67.

[0513] The PEgRNA components and editing results are summarized in Table 67. Editing efficiency above the non-transfection control value was observed in cells edited with PEgRNAs having different spacers. For PEgRNAs having the spacer sequence of SEQ ID NO: 35 or SEQ ID NO: 139, editing levels significantly higher than that observed in the non-transfection control was observed, with higher editing efficiency observed in cells edited with PEgRNAs having the spacer of SEQ ID NO: 139 (nick-to-edit distance=1). Successful prime editing was observed for PEgRNAs both with and without the AGG to AAG PAM silencing edit. Compared to corresponding PEgRNAs without the PAM silencing edit, increased editing efficiency was observed in treatment with 21 of 23 PEgRNAs that contained the PAM silencing edit. Significantly increased editing efficiency was observed with PEgRNAs that contained a 12, 14, or 16nt long RTT and the PAM silencing edit.

TABLE 67
Prime Editing at c.67del (322delG) mutation
site in human FANCC gene (PE2 system)

| PEgRNA | spacer | PBS | | RTT | | | |
|---|---|---|---|---|---|---|---|
| SEQ ID | SEQ ID | SEQ ID | PBS | SEQ ID | RTT | | |
| No.¹ | No. | No. | length | No.² | length | % Editing | % Indels |
| Mock | NA | NA | NA | NA | NA | 0.05% | 0% |
| 965 | 35 | 923 | 8 | 936 | 11 | 4.83% | 0.03% |
| 967 | 35 | 923 | 8 | 939 | 14 | 5.56% | 0% |
| 971 | 35 | 923 | 8 | 941 | 16 | 3.18% | 0% |
| 976 | 35 | 923 | 8 | 943 | 18 | 2.80% | 0.03% |
| 982 | 35 | 923 | 8 | 384 | 20 | 2.34% | 0.02% |
| 966 | 35 | 925 | 10 | 936 | 11 | 5.28% | 0.04% |
| 970 | 35 | 925 | 10 | 939 | 14 | 3.89% | 0.03% |
| 975 | 35 | 925 | 10 | 941 | 16 | 3.63% | 0% |
| 981 | 35 | 925 | 10 | 943 | 18 | 2.97% | 0.01% |
| 988 | 35 | 925 | 10 | 384 | 20 | 1.85% | 0.02% |
| 968 | 35 | 927 | 12 | 936 | 11 | 5.55% | 0.03% |
| 974 | 35 | 927 | 12 | 939 | 14 | 4.88% | 0.04% |
| 980 | 35 | 927 | 12 | 941 | 16 | 4.87% | 0.06% |
| 987 | 35 | 927 | 12 | 943 | 18 | 2.93% | 0.01% |
| 993 | 35 | 927 | 12 | 384 | 20 | 2.72% | 0% |
| 972 | 35 | 929 | 14 | 936 | 11 | 5.30% | 0.04% |
| 979 | 35 | 929 | 14 | 939 | 14 | 7.54% | 0.05% |
| 986 | 35 | 929 | 14 | 941 | 16 | 6.97% | 0.07% |
| 992 | 35 | 929 | 14 | 943 | 18 | 7.41% | 0.10% |
| 998 | 35 | 929 | 14 | 384 | 20 | 7.08% | 0.06% |
| 219 | 139 | 145 | 8 | 157 | 10 | 8% | 0.11% |
| 222 | 139 | 145 | 8 | 160 | 12 | 11.58% | 0.04% |
| 224 | 139 | 145 | 8 | 161* | 12 | 12.41% | 0.06% |
| 227 | 139 | 145 | 8 | 163 | 14 | 5.64% | 0.11% |
| 232 | 139 | 145 | 8 | 164* | 14 | 16.91% | 0.01% |
| 237 | 139 | 145 | 8 | 166 | 16 | 4.86% | 0.02% |
| 245 | 139 | 145 | 8 | 167* | 16 | 14.20% | 0% |
| 299# | 139 | 145 | 8 | 182* | 30 | 5.10% | 0.01% |
| 301# | 139 | 145 | 8 | 185* | 32 | 8.20% | 0.01% |
| 221 | 139 | 147 | 10 | 157 | 10 | 10.74% | 0.07% |
| 223 | 139 | 147 | 10 | 158* | 10 | 6.54% | 0% |
| 226 | 139 | 147 | 10 | 160 | 12 | 6.99% | 0% |
| 231 | 139 | 147 | 10 | 161* | 12 | 13.11% | 0.05% |
| 236 | 139 | 147 | 10 | 163 | 14 | 8.44% | 0% |
| 244 | 139 | 147 | 10 | 164* | 14 | 20.09% | 0% |
| 250 | 139 | 147 | 10 | 166 | 16 | 7.06% | 0.06% |
| 259 | 139 | 147 | 10 | 167* | 16 | 17.08% | 0% |
| 300# | 139 | 147 | 10 | 182* | 30 | 9.20% | 0% |
| 303# | 139 | 147 | 10 | 185* | 32 | 6.78% | 0% |
| 225 | 139 | 149 | 12 | 157 | 10 | 10.35% | 0.02% |
| 230 | 139 | 149 | 12 | 158* | 10 | 6.93% | 0.03% |
| 235 | 139 | 149 | 12 | 160 | 12 | 7.21% | 0.03% |
| 243 | 139 | 149 | 12 | 161* | 12 | 12.04% | 0.01% |
| 249 | 139 | 149 | 12 | 163 | 14 | 4.51% | 0.02% |
| 258 | 139 | 149 | 12 | 164* | 14 | 16.23% | 0.02% |
| 264 | 139 | 149 | 12 | 166 | 16 | 9.07% | 0.02% |
| 274 | 139 | 149 | 12 | 167* | 16 | 10.86% | 0.02% |
| 302# | 139 | 149 | 12 | 182* | 30 | 7.46% | 0% |
| 306# | 139 | 149 | 12 | 185* | 32 | 4.35% | 0.01% |
| 234 | 139 | 151 | 14 | 157 | 10 | 6.54% | 0.01% |
| 242 | 139 | 151 | 14 | 158* | 10 | 6.60% | 0.01% |
| 248 | 139 | 151 | 14 | 160 | 12 | 7.84% | 0% |
| 257* | 139 | 151 | 14 | 161* | 12 | 14.23% | 0.01% |
| 263 | 139 | 151 | 14 | 163 | 14 | 5.57% | 0.01% |
| 273 | 139 | 151 | 14 | 164* | 14 | 14.67% | 0% |
| 279 | 139 | 151 | 14 | 166 | 16 | 3.76% | 0% |
| 286 | 139 | 151 | 14 | 167* | 16 | 12.36% | 0% |
| 305# | 139 | 151 | 14 | 182* | 30 | 7.05% | 0.01% |
| 308# | 139 | 151 | 14 | 185* | 32 | 2.06% | 0.01% |
| 1403 | 212 | 1238 | 8 | 28 | 20 | 0.16% | 0.02% |
| 1405 | 212 | 1238 | 8 | 1288 | 22 | 0.30% | 0.07% |
| 1409 | 212 | 1238 | 8 | 1306 | 25 | 0.47% | 0.02% |
| 1415 | 212 | 1238 | 8 | 1318 | 27 | 0.16% | 0.02% |
| 1421 | 212 | 1238 | 8 | 1330 | 29 | 0.13% | 0% |
| 1404 | 212 | 1240 | 10 | 28 | 20 | 0.17% | 0.07% |
| 1407 | 212 | 1240 | 10 | 1288 | 22 | 0.50% | 0.15% |
| 1414 | 212 | 1240 | 10 | 1306 | 25 | 1.10% | 0% |
| 1420 | 212 | 1240 | 10 | 1318 | 27 | 0.30% | 0.04% |
| 1427 | 212 | 1240 | 10 | 1330 | 29 | 0.17% | 0.34% |
| 1406 | 212 | 1242 | 12 | 28 | 20 | 0.72% | 0.01% |
| 1411 | 212 | 1242 | 12 | 1288 | 22 | 0.64% | 0.03% |
| 1419 | 212 | 1242 | 12 | 1306 | 25 | 0.95% | 0.01% |
| 1426 | 212 | 1242 | 12 | 1318 | 27 | 0.21% | 0% |
| 1432 | 212 | 1242 | 12 | 1330 | 29 | 0.31% | 0.01% |
| 1410 | 212 | 1244 | 14 | 28 | 20 | 0.13% | 0.01% |
| 1416 | 212 | 1244 | 14 | 1288 | 22 | 0.78% | 0.04% |
| 1425 | 212 | 1244 | 14 | 1306 | 25 | 0.55% | 0.07% |
| 1431 | 212 | 1244 | 14 | 1318 | 27 | 0.18% | 0.04% |
| 1436 | 212 | 1244 | 14 | 1330 | 29 | 0.17% | 0% |
| 1541 | 213 | 1471 | 8 | 1500 | 32 | 0.10% | 0% |
| 1543 | 213 | 1471 | 8 | 1508 | 34 | 0.25% | 0.02% |
| 1547 | 213 | 1471 | 8 | 1520 | 37 | 0.50% | 0.04% |
| 1554 | 213 | 1471 | 8 | 1528 | 39 | 0.48% | 0% |
| 1542 | 213 | 1473 | 10 | 1500 | 32 | 0.08% | 0.06% |
| 1545 | 213 | 1473 | 10 | 1508 | 34 | 0.71% | 0% |
| 1553 | 213 | 1473 | 10 | 1520 | 37 | 0.45% | 0.01% |
| 1558 | 213 | 1473 | 10 | 1528 | 39 | 0.37% | 0% |
| 1544 | 213 | 1475 | 12 | 1500 | 32 | 0.09% | 0% |
| 1549 | 213 | 1475 | 12 | 1508 | 34 | 0.30% | 0.03% |
| 1557 | 213 | 1475 | 12 | 1520 | 37 | 1.20% | 0.02% |
| 1563 | 213 | 1475 | 12 | 1528 | 39 | 0.46% | 0% |
| 1552 | 213 | 1476 | 13 | 1508 | 34 | 0.52% | 0.01% |
| 1548 | 213 | 1477 | 14 | 1500 | 32 | 0.07% | 0% |
| 1562 | 213 | 1477 | 14 | 1520 | 37 | 0.53% | 0.03% |
| 1567 | 213 | 1477 | 14 | 1528 | 39 | 0.53% | 0.01% |

[0514] 1. All PEgRNAs used experimentally contained a 3′ TTTT end adaptation, and further contained chemical modifications 3′ mN*mN*mN*N and 5′mN*mN*mN*N modifications, where m indicates that the nucleotide contains a 2′-O-Me modification and a * indicates a phosphorothioate bond. The PEgRNA used experimentally for PEgRNA sequences that are annotated with “#” further contained an additional 5′ G, a linker sequence (AACATTGA), and a 3′ hairpin having the sequence of SEQ ID NO: 3591 (i.e. from 5′ to 3′: additional nucleotide G, indicated Spacer sequence, a gRNA core having the sequence of SEQ ID NO: 3666, the indicated RTT sequence, the indicated PBS sequence, the linker sequence, and the 3′ hairpin according to SEQ ID NO: 3591).
[0515] 2. *: RTT encodes a synonymous AGG to AAG PAMsilencing edit.

[0516] 9 PEgRNAs from the PE2 editing experiment above were also tested with a PE3 editing strategy. HEK293T cells were co-transected with mRNA encoding a prime editor fusion protein, synthesized PEgRNA and ngRNA, and gDNA was harvested for sequencing with Miseq as described in Example 1. The PEgRNA and ngRNA components and editing results are summarized in Tables 68-73. A non-transfection control indicates that the cells were not transfected with any PEgRNA or prime editor-encoding polynucleotide. Efficient editing was observed in cells edited with PEgRNAs having the spacer sequence of SEQ ID NO: 139 or SEQ ID NO: 35 paired with all ngRNAs tested, for both PEgRNAs with and without a PAM silencing mutation. Including an additional PAM silencing mutation in sequence encoded by the RTT appears to improve editing efficiency.

TABLE 68
Prime Editing at c.67del (322delG) mutation site in human
FANCC gene (PE3 system) with a PEgRNA having the spacer
as set forth in SEQ ID NO: 212 and ngRNAs

| PEgRNA | ngRNA | ngRNA | nick-to- | | |
|---|---|---|---|---|---|
| SEQ ID | spacer SEQ | SEQ ID | nick | % | % |
| No.¹ | ID No. | No.1 | distance | Editing | Indels |
| 1414 | 47 | 49# | 58 | 3.03% | 0.45% |
| | 31 | 51 | 31 | 4.43% | 0.30% |
| | 35 | 50 | 37 | 3.82% | 1% |
| | 28 | 52# | 19 | 1.37% | 0.32% |

[0517] 1. PEgRNA and all ngRNAs used experimentally contained a 3′ TTTT end adaptation, and further contained chemical modifications 3′ mN*mN*mN*N and 5′mN*mN*mN*N modifications, where m indicates that the nucleotide contains a 2′-O-Me modification and a * indicates a phosphorothioate bond. The ngRNAs used experimentally for ngRNA sequences that are annotated with “#” further contained an additional 5′ G, a linker sequence (AACATTGA), and a 3′ hairpin having the sequence of SEQ ID NO: 3591 (i.e. from 5′ to 3′: additional nucleotide G, indicated Spacer sequence, a gRNA core having the sequence of SEQ ID NO: 3666,the linker sequence, and the 3′ hairpin according to SEQ ID NO: 3591).

TABLE 69
Prime Editing at c.64del (322delG) mutation site in human
FANCC gene (PE3 system) with a PEgRNA having the spacer
as set forth in SEQ ID NO: 139 and ngRNAs

| PEgRNA | ngRNA | ngRNA | nick-to- | | |
|---|---|---|---|---|---|
| SEQ ID | spacer SEQ | SEQ ID | nick | % | % |
| No.^{1,2} | ID No. | No.¹ | distance | Editing | Indels |
| 236 | 212 | 323 | 22 | 15.91% | 0.87% |
| | 213 | 324 | 34 | 18.35% | 1.12% |
| | 203 | 325# | 35 | 16% | 0.83% |
| | 209 | 326 | 46 | 22.79% | 1.31% |
| | 195 | 327# | 68 | 22.23% | 1.23% |
| | 199 | 328# | 77 | 30.14% | 1.63% |
| | 196 | 329# | 97 | 29.14% | 1.35% |
| 244* | 212 | 323 | 22 | 10.58% | 0.37% |
| | 213 | 324 | 34 | 12.56% | 0.56% |
| | 203 | 325# | 35 | 9.45% | 0.40% |
| | 209 | 326 | 46 | 18.16% | 0.66% |
| | 195 | 327# | 68 | 20.18% | 0.67% |
| | 199 | 328# | 77 | 26.59% | 0.73% |
| | 196 | 329# | 97 | 50.48% | 0.97% |

[0518] 1. All PEgRNAs and ngRNAs used experimentally contained a 3′ TTTT end adaptation, and further contained chemical modifications 3′ mN*mN*mN*N and 5′mN*mN*mN*N modifications, where m indicates that the nucleotide contains a 2′-O-Me modification and a * indicates a phosphorothioate bond. The ngRNAs used experimentally for ngRNA sequences that are annotated with “#” further contained an additional 5′G, a linker sequence (AACATGA), and a 3′ hairpin having the sequence of SEQ ID NO: 359] (i. e. from 5′ to 3′: additional nucleotide G, indicated Spacer sequence, a gRNA core having the sequence of SEQ ID NO: 3666,the linker sequence, and the 3′ hairpin according to SEQ ID NO: 359]).
[0519] 2. *:PEgRNA contains an RTT that encodes a synonymous AGG to AAG PAM silencing edit.

TABLE 70
Prime Editing at c.64del (322delG) mutation site in human
FANCC gene (PE3 system) with a PEgRNA having the spacer
as set forth in SEQ ID NO: 139 and ngRNAs¹

| PEgRNA | ngRNA | ngRNA | nick-to- | | |
|---|---|---|---|---|---|
| SEQ ID | spacer | SEQ ID | nick | % | % |
| No.^{2,3} | SEQ ID | No.² | distance | Editing | Indels |
| Non- | NA | NA | N/A | 0.0999 | 3.0969 |
| transfection | | | | | |
| control | | | | | |
| 236 | 209 | 326 | 46 | 27.0167 | 15.3898 |
| 250 | 209 | 326 | 46 | 23.9985 | 13.9927 |
| 244* | 209 | 326 | 46 | 34.4241 | 23.0356 |
| 259* | 209 | 326 | 46 | 34.6201 | 22.1377 |

[0520] 1. Experiment was performed separately from the experiment in Table 69 (PEgRNAs and ngRNAs synthesized by different vendors).
[0521] 2. All PEgRNAs and ngRNAs used experimentally contained a 3′ TTTT end adaptation, and further contained chemical modifications 3′ mN*mN*mN*N and 5′mN*mN*mN*N modifications, where m indicates that the nucleotide contains a 2′-O-Me modification and a * indicates a phosphorothioate bond. The ngRNAs used experimentally for PEgRNA sequences annotated with “#” further contained an additional 5′ G, a linker sequence (AACATTGA), and a 3′ hairpin having the sequence of SEQ ID NO: 359] (i.e. from 5′ to 3′: additional nucleotide G, indicated Spacer sequence, a gRNA core having the sequence of SEQ ID NO: 3666, the linker sequence, and the 3′ hairpin according to SEQ ID NO: 359]).
[0522] 3. *: PEgRNA contains an RTT that encodes a synonymous AGG to AAG PAM silencing edit.

TABLE 71
Prime Editing at c.67del (322delG) mutation site in human
FANCC gene (PE3 system) with a PEgRNA having the spacer
as set forth in SEQ ID NO: 213 and ngRNAs

| PEgRNA | ngRNA | ngRNA | nick-to- | | |
|---|---|---|---|---|---|
| SEQ ID | spacer SEQ | SEQ ID | nick | % | % |
| No.¹ | ID No. | No.¹ | distance | Editing | Indels |
| 1558 | 47 | 49# | 70 | 1.72% | 0.39% |
| | 31 | 51 | 43 | 2.46% | 0.25% |
| | 35 | 50 | 49 | 3.33% | 0.81% |
| | 28 | 52# | 31 | 0.94% | 0.24% |

[0523] 1. PEgRNA and all ngRNAs used experimentally contained a 3′ TTTT end adaptation, and further contained chemical modifications 3′ mN*mN*mN*N and 5′mN*mN*mN*N modifications, where m indicates that the nucleotide contains a 2′-O-Me modification and a * indicates a phosphorothioate bond. The ngRNAs used experimentally for PEgRNA sequences annotated with “#” further contained an additional 5′ G, a linker sequence (AACATTGA), and a 3′ hairpin having the sequence of SEQ ID NO: 359] (i. e. from 5′ to 3′: additional nucleotide G, indicated Spacer sequence, a gRNA core having the sequence of SEQ ID NO: 3666, the linker sequence, and the 3′ hairpin according to SEQ ID NO: 359]).

TABLE 72
Prime Editing at c.67del (322delG) mutation site in human
FANCC gene (PE3 system) with a PERNA having the spacer
as set forth in SEQ ID NO: 35 and ngRNAs

| PEgRNA | ngRNA | ngRNA | nick-to- | | |
|---|---|---|---|---|---|
| SEQ ID | spacer SEQ | SEQ ID | nick | % | % |
| No.¹ | ID No. | No.¹ | distance | Editing | Indels |
| 968 | 212 | 323 | 28 | 18.37% | 4.08% |
| | 213 | 324 | 40 | 20.96% | 5.17% |
| | 203 | 325# | 41 | 18.81% | 1.99% |
| | 209 | 326 | 52 | 24.22% | 3.06% |
| | 195 | 327# | 74 | 25.93% | 2.61% |
| | 199 | 328# | 83 | 27.62% | 2.56% |
| | 196 | 329# | 103 | 15.43% | 1.02% |
| 986 | 212 | 323 | 28 | 22.11% | 2.38% |
| | 213 | 324 | 40 | 26.69% | 2.58% |
| | 203 | 325# | 41 | 24.80% | 1.56% |
| | 209 | 326 | 52 | 29.93% | 2.48% |
| | 195 | 327# | 74 | 30.42% | 1.72% |
| | 199 | 328# | 83 | 35.32% | 2.18% |
| | 196 | 329# | 103 | 22.23% | 1.12% |

[0524] 1. All PEgRNAs and ngRNAs used experimentally contained a 3′ IT T end adaptation, and further contained chemical modifications 3′ mN*mN*mN*N and 5′mN*mN*mN*N modifications, where m indicates that the nucleotide contains a 2′-O-Me modification and a * indicates a phosphorothioate bond. The ngRNAs used experimentally for PEgRNA sequences annotated with “#” further contained an additional 5′ G, a linker sequence (AACATTGA), and a 3′ hairpin having the sequence of SEQ ID NO: 3591 (i.e. from 5′ to 3′: additional nucleotide G, indicated Spacer sequence, a gRNA core having the sequence of SEQ ID NO: 3666,the linker sequence, and the 3′ hairpin according to SEQ ID NO: 3591).

TABLE 73
Prime Editing at c.67del (322delG) mutation site in human
FANCC gene (PE3 system) with a PEgRNA having the spacer
as set forth in SEQ ID NO: 35 and ngRNAs¹

| PEgRNA | ngRNA | ngRNA | nick-to- | | |
|---|---|---|---|---|---|
| SEQ ID | spacer SEQ | SEQ ID | nick | editing | indel |
| No.² | ID No. | No.² | distance | efficiency | frequency |
| Non- | NA | NA | N/A | 0.0999 | 3.0969 |
| transfection | | | | | |
| control | | | | | |
| 970 | 209 | 326 | 52 | 20.8879 | 13.3835 |

[0525] 1. Experiment was performed separately from the experiment in Table 73 (PEgRNAs and ngRNAs synthesized by different vendors).
[0526] 2. All PEgRNAs and ngRNAs used experimentally contained a 3′ TTTT end adaptation, and further contained chemical modifications 3′ mN*mN*mN*N and 5′mN*mN*mN*N modifications, where m indicates that the nucleotide contains a 2′-O-Me modification and a * indicates a phosphorothioate bond.

### Example 6: Prime Editing of the 322delG Mutation at Endogenous FANCC Site in Lymphoblastoid Cell Line (LCL) from Individual Carrying the Mutation

[0527] PEgRNAs having a spacer according to SEQ ID NO: 139 or SEQ ID NO: 35 and ngRNAs were chemically synthesized and purified as described in Example 1. Lymphoblastoid cells (LCLs) from a human donor that carries the 322delG mutation were used for editing. The patient's FANCC gene is heterozygotic at the 322delG mutation site; the genetic makeup was unclear for other mutations in the FANCC gene that may impact the DNA repair function. For each Prime Editing composition treatment, the LCLs were mixed with mRNA encoding a Prime Editor fusion protein and a PEgRNA (along with a ngRNA for PE3 editing strategy) in a Maxcyte cartridge, and electroporated using the MaxCyte electroporation system following the Manufacturer's protocol. On day 4 and day 11 after electroporation, genomic DNA was extracted and analyzed with Miseq sequencing. Because the donor only carries one copy of FANCC that harbors the 322delG mutation, editing efficiency was estimated as (Miseq editing %)-50%.

[0528] The PEgRNA and ngRNA components and editing results are summarized in Table 74. A non-transfection control indicates that the cells were not transfected with any PEgRNA or prime editor-encoding polynucleotide. The PEgRNA sequences used are summarized in Table 75.

TABLE 74
Prime Editing at c.67del (322delG) mutation site in
FANCC gene in patient derived LCLs (PE3 system)

| | | ngRNA | | | | | |
|---|---|---|---|---|---|---|---|
| PEgRNA | ngRNA | spacer | nick-to- | | | | |
| SEQ ID | SEQ ID | SEQ ID | nick | % Editing | % Indels | % Editing | % Indels |
| No.¹ | No.² | No. | distance | day 4 | day 4 | day 11 | day 11 |
| non- | NA | NA | NA | −0.77% | 0.12% | 0.12% | 0.12% |
| transfection | | | | | | | |
| control | | | | | | | |
| 236 | PE2 | NA | NA | 0.02% | 0.18% | 1.22% | 0.24% |
| 236 | 326 | 209 | 46 | 10.84% | 2.72% | 9.30% | 3.01% |
| 236 | 327# | 195 | 68 | 2.66% | 0.65% | 5.58% | 0.69% |
| 236 | 328# | 199 | 77 | 6.33% | 1.23% | 5.16% | 1.06% |
| 236 | 329# | 196 | 97 | 3.01% | 0.80% | 8.99% | 0.15% |
| 250 | PE2 | N/A | N/A | 0.10% | 0.20% | 0.82% | 0.21% |
| 250 | 326 | 209 | 46 | 8.03% | 3.07% | 4.43% | 3.17% |
| 250 | 327# | 195 | 68 | 3.94% | 1.21% | 4.36% | 1.51% |
| 250 | 328# | 199 | 77 | 2.73% | 0.69% | 1.37% | 0.95% |
| 250 | 329# | 196 | 97 | 2.96% | 0.95% | 1.74% | 0.73% |
| 244* | PE2 | N/A | N/A | 1.28% | 0.12% | 0.02% | 0.10% |
| 244* | 326 | 209 | 46 | 5.33% | 2.17% | 4.88% | 1.94% |
| 244* | 327# | 195 | 68 | 1.77% | 0.51% | 0.84% | 0.69% |
| 244* | 328# | 199 | 77 | 3.05% | 0.82% | 2.11% | 0.80% |
| 244* | 329# | 196 | 97 | 1.47% | 0.57% | −0.08% | 0.45% |
| 259* | PE2 | N/A | N/A | −0.11% | 0.18% | −1.61% | 0.19% |
| 259* | 326 | 209 | 46 | 5.71% | 1.66% | 3.66% | 2.10% |
| 259* | 327# | 195 | 68 | 1.64% | 0.45% | 1.27% | 0.55% |
| 259* | 328# | 199 | 77 | 2.07% | 0.66% | 2.19% | 0.87% |
| 259* | 329# | 196 | 97 | 0.74% | 0.56% | 2.17% | 0.49% |
| 966 | PE2 | N/A | NA | −0.91% | 0.21% | 1.35% | 0.11% |
| 966 | 326 | 209 | 52 | 2.02% | 1.32% | 0.40% | 2.09% |
| 966 | 327# | 195 | 74 | 0.17% | 0.44% | 0.17% | 0.55% |
| 966 | 328# | 199 | 83 | 0.76% | 0.46% | 1.58% | 0.65% |
| 966 | 329# | 196 | 103 | 0.49% | 0.51% | 0.98% | 0.29% |
| 970 | PE2 | N/A | N/A | −0.11% | 0.16% | −1.45% | 0.13% |
| 970 | 326 | 209 | 52 | 3.42% | 1.47% | 4.03% | 1.97% |
| 970 | 327# | 195 | 74 | 1.93% | 0.65% | −0.75% | 0.89% |
| 970 | 328# | 199 | 83 | 2.25% | 0.35% | 0.41% | 0.51% |
| 970 | 329# | 196 | 103 | 1.90% | 0.48% | 0.72% | 0.36% |

[0529] 1. All PEgRNAs used experimentally contained a 3′ TT IT end adaptation, and further contained chemical modifications 3′ mN*mN*mN*N and 5′mN*mN*mN*N modifications, where m indicates that the nucleotide contains a 2′-O-Me modification and a * indicates a phosphorothioate bond. “#” following the PEgRNA SEQ ID NO. indicates that the RTT of the PEgRNA encodes a synonymous AGG to AAG PAM silencing edit.
[0530] 2. All ngRNAs used experimentally contained a 3′ TTTT end adaptation, and further contained chemical modifications 3′ mN*mN*mN*N and 5′mN*mN*mN*N modifications, where m indicates that the nucleotide contains a 2′-O-Me modification and a * indicates a phosphorothioate bond. The ngRNA used experimentally for PEgRNA sequences in Table 74 indicated with “#” further contained an additional 5′ G, a linker sequence (AACATTGA), and a 3′ hairpin having the sequence of SEQ ID NO: 3591 (i.e. from 5′ to 3′: additional nucleotide G, indicated Spacer sequence, a gRNA core having the sequence of SEQ ID NO: 3666, the indicated RTT sequence, the indicated PBS sequence, the linker sequence, and the 3′ hairpin according to SEQ ID NO: 3591). “PE2” indicates that a PE2 editing strategy was used (i.e. no ngRNA was used).

TABLE 75
Summary of PEgRNAs used in Table 74

| PERNA | PEgRNA | PBS | | RTT | |
|---|---|---|---|---|---|
| SEQ ID | spacer SEQ | SEQ | PBS | SEQ | RTT |
| No. | ID No. | ID No. | length | ID No. | length |
| 236 | 139 | 147 | 10 | 163 | 14 |
| 250 | 139 | 147 | 10 | 166 | 16 |
| 244 | 139 | 147 | 10 | 164 | 14 |
| 259 | 139 | 147 | 10 | 167 | 16 |
| 966 | 35 | 925 | 10 | 936 | 11 |
| 970 | 35 | 925 | 10 | 939 | 14 |

The application's sequence listing, which the Patent Office published only in electronic form, follows.

SEQUENCE LISTING (3824 sequences)

SEQ ID NO: 1 - RNA, 17 nt, synthetic construct
  source 1..17: mol_type = other RNA
tgagccacgtgaagaca

SEQ ID NO: 2 - RNA, 18 nt, synthetic construct
  source 1..18: mol_type = other RNA
ctgagccacgtgaagaca

SEQ ID NO: 3 - RNA, 19 nt, synthetic construct
  source 1..19: mol_type = other RNA
actgagccacgtgaagaca

SEQ ID NO: 4 - RNA, 20 nt, synthetic construct
  source 1..20: mol_type = other RNA
aactgagccacgtgaagaca

SEQ ID NO: 5 - RNA, 21 nt, synthetic construct
  source 1..21: mol_type = other RNA
gaactgagccacgtgaagaca

SEQ ID NO: 6 - RNA, 22 nt, synthetic construct
  source 1..22: mol_type = other RNA
ggaactgagccacgtgaagaca

SEQ ID NO: 7-11 - skipped (5 entries)

SEQ ID NO: 12 - RNA, 10 nt, synthetic construct
  source 1..10: mol_type = other RNA
cttcacgtgg

SEQ ID NO: 13 - RNA, 11 nt, synthetic construct
  source 1..11: mol_type = other RNA
cttcacgtggc

SEQ ID NO: 14 - RNA, 12 nt, synthetic construct
  source 1..12: mol_type = other RNA
cttcacgtggct

SEQ ID NO: 15 - RNA, 13 nt, synthetic construct
  source 1..13: mol_type = other RNA
cttcacgtggctc

SEQ ID NO: 16 - RNA, 14 nt, synthetic construct
  source 1..14: mol_type = other RNA
cttcacgtggctca

SEQ ID NO: 17 - RNA, 15 nt, synthetic construct
  source 1..15: mol_type = other RNA
cttcacgtggctcag

SEQ ID NO: 18 - RNA, 16 nt, synthetic construct
  source 1..16: mol_type = other RNA
cttcacgtggctcagt

SEQ ID NO: 19 - RNA, 17 nt, synthetic construct
  source 1..17: mol_type = other RNA
cttcacgtggctcagtt

SEQ ID NO: 20 - RNA, 18 nt, synthetic construct
  source 1..18: mol_type = other RNA
cttcacgtggctcagttc

SEQ ID NO: 21 - RNA, 19 nt, synthetic construct
  source 1..19: mol_type = other RNA
cttcacgtggctcagttcc

SEQ ID NO: 22 - RNA, 39 nt, synthetic construct
  source 1..39: mol_type = other RNA
gatcaggcttccactttggaaacccagcaagacacctgt

SEQ ID NO: 23 - RNA, 40 nt, synthetic construct
  source 1..40: mol_type = other RNA
ggatcaggcttccactttggaaacccagcaagacacctgt

SEQ ID NO: 24 - RNA, 20 nt, synthetic construct
  source 1..20: mol_type = other RNA
aagatggctcaagattcagt

SEQ ID NO: 25 - RNA, 20 nt, synthetic construct
  source 1..20: mol_type = other RNA
aagattcagtagatctttct

SEQ ID NO: 26 - RNA, 20 nt, synthetic construct
  source 1..20: mol_type = other RNA
aagctttctgtatgggatca

SEQ ID NO: 27 - RNA, 20 nt, synthetic construct
  source 1..20: mol_type = other RNA
agatctttcttgtgattatc

SEQ ID NO: 28 - RNA, 20 nt, synthetic construct
  source 1..20: mol_type = other RNA
atgggatcaggcttccactt

SEQ ID NO: 29 - RNA, 20 nt, synthetic construct
  source 1..20: mol_type = other RNA
ccttttcgctttttccaaga

SEQ ID NO: 30 - RNA, 20 nt, synthetic construct
  source 1..20: mol_type = other RNA
cttttcgctttttccaagat

SEQ ID NO: 31 - RNA, 20 nt, synthetic construct
  source 1..20: mol_type = other RNA
gaagctttctgtatgggatc

SEQ ID NO: 32 - RNA, 20 nt, synthetic construct
  source 1..20: mol_type = other RNA
gatgcagaagctttctgtat

SEQ ID NO: 33 - RNA, 20 nt, synthetic construct
  source 1..20: mol_type = other RNA
gattcagtagatctttcttg

SEQ ID NO: 34 - RNA, 20 nt, synthetic construct
  source 1..20: mol_type = other RNA
gctttttccaagatggctca

SEQ ID NO: 35 - RNA, 20 nt, synthetic construct
  source 1..20: mol_type = other RNA
ggatgcagaagctttctgta

SEQ ID NO: 36 - RNA, 20 nt, synthetic construct
  source 1..20: mol_type = other RNA
ggcttccactttggaaaccc

SEQ ID NO: 37 - RNA, 20 nt, synthetic construct
  source 1..20: mol_type = other RNA
gtgaagggacatcacctttt

SEQ ID NO: 38 - RNA, 20 nt, synthetic construct
  source 1..20: mol_type = other RNA
tcaccttttcgctttttcca

SEQ ID NO: 39 - RNA, 20 nt, synthetic construct
  source 1..20: mol_type = other RNA
tccaagatggctcaagattc

SEQ ID NO: 40 - RNA, 20 nt, synthetic construct
  source 1..20: mol_type = other RNA
tccactttggaaacccagca

SEQ ID NO: 41 - RNA, 20 nt, synthetic construct
  source 1..20: mol_type = other RNA
tgattatcagttttggatgc

SEQ ID NO: 42 - RNA, 20 nt, synthetic construct
  source 1..20: mol_type = other RNA
tggaaacccagcaagacacc

SEQ ID NO: 43 - RNA, 20 nt, synthetic construct
  source 1..20: mol_type = other RNA
tgggatcaggcttccacttt

SEQ ID NO: 44 - RNA, 20 nt, synthetic construct
  source 1..20: mol_type = other RNA
ttatcagttttggatgcaga

SEQ ID NO: 45 - RNA, 20 nt, synthetic construct
  source 1..20: mol_type = other RNA
ttcttgtgattatcagtttt

SEQ ID NO: 46 - RNA, 20 nt, synthetic construct
  source 1..20: mol_type = other RNA
ttgtgattatcagttttgga

SEQ ID NO: 47 - RNA, 20 nt, synthetic construct
  source 1..20: mol_type = other RNA
tttcttgtgattatcagttt

SEQ ID NO: 48 - RNA, 20 nt, synthetic construct
  source 1..20: mol_type = other RNA
ttttggatgcagaagctttc

SEQ ID NO: 49 - RNA, 96 nt, synthetic construct
  source 1..96: mol_type = other RNA
tttcttgtgattatcagtttgttttagagctagaaatagcaagttaaaataaggctagtccgttatcaacttgaaaaagtggcaccgagtcggtgc

SEQ ID NO: 50 - RNA, 96 nt, synthetic construct
  source 1..96: mol_type = other RNA
ggatgcagaagctttctgtagttttagagctagaaatagcaagttaaaataaggctagtccgttatcaacttgaaaaagtggcaccgagtcggtgc

SEQ ID NO: 51 - RNA, 96 nt, synthetic construct
  source 1..96: mol_type = other RNA
gaagctttctgtatgggatcgttttagagctagaaatagcaagttaaaataaggctagtccgttatcaacttgaaaaagtggcaccgagtcggtgc

SEQ ID NO: 52 - RNA, 96 nt, synthetic construct
  source 1..96: mol_type = other RNA
atgggatcaggcttccacttgttttagagctagaaatagcaagttaaaataaggctagtccgttatcaacttgaaaaagtggcaccgagtcggtgc

SEQ ID NO: 53 - RNA, 100 nt, synthetic construct
  source 1..100: mol_type = other RNA
ggatgcagaagctttctgtagttttagagctagaaatagcaagttaaaataaggctagtccgttatcaacttgaaaaagtggcaccgagtcggtgctttt

SEQ ID NO: 54 - RNA, 100 nt, synthetic construct
  source 1..100: mol_type = other RNA
gaagctttctgtatgggatcgttttagagctagaaatagcaagttaaaataaggctagtccgttatcaacttgaaaaagtggcaccgagtcggtgctttt

SEQ ID NO: 55 - RNA, 101 nt, synthetic construct
  source 1..101: mol_type = other RNA
gtttcttgtgattatcagtttgttttagagctagaaatagcaagttaaaataaggctagtccgttatcaacttgaaaaagtggcaccgagtcggtgctttt

SEQ ID NO: 56 - RNA, 101 nt, synthetic construct
  source 1..101: mol_type = other RNA
gatgggatcaggcttccacttgttttagagctagaaatagcaagttaaaataaggctagtccgttatcaacttgaaaaagtggcaccgagtcggtgctttt

SEQ ID NO: 57 - RNA, 130 nt, synthetic construct
  source 1..130: mol_type = other RNA
ggatgcagaagctttctgtagttttagagctagaaatagcaagttaaaataaggctagtccgttatcaacttgaaaaagtggcaccgagtcggtgcaacattgacgcgtctctacgtgggggcgcgtttt

SEQ ID NO: 58 - RNA, 130 nt, synthetic construct
  source 1..130: mol_type = other RNA
gaagctttctgtatgggatcgttttagagctagaaatagcaagttaaaataaggctagtccgttatcaacttgaaaaagtggcaccgagtcggtgcaacattgacgcgtctctacgtgggggcgcgtttt

SEQ ID NO: 59 - RNA, 131 nt, synthetic construct
  source 1..131: mol_type = other RNA
gtttcttgtgattatcagtttgttttagagctagaaatagcaagttaaaataaggctagtccgttatcaacttgaaaaagtggcaccgagtcggtgcaacattgacgcgtctctacgtgggggcgcgtttt

SEQ ID NO: 60 - RNA, 131 nt, synthetic construct
  source 1..131: mol_type = other RNA
gatgggatcaggcttccacttgttttagagctagaaatagcaagttaaaataaggctagtccgttatcaacttgaaaaagtggcaccgagtcggtgcaacattgacgcgtctctacgtgggggcgcgtttt

SEQ ID NO: 61 - RNA, 17 nt, synthetic construct
  source 1..17: mol_type = other RNA
tgaagacaggtgtcttg

SEQ ID NO: 62 - RNA, 18 nt, synthetic construct
  source 1..18: mol_type = other RNA
gtgaagacaggtgtcttg

SEQ ID NO: 63 - RNA, 19 nt, synthetic construct
  source 1..19: mol_type = other RNA
cgtgaagacaggtgtcttg

SEQ ID NO: 64 - RNA, 20 nt, synthetic construct
  source 1..20: mol_type = other RNA
acgtgaagacaggtgtcttg

SEQ ID NO: 65 - RNA, 21 nt, synthetic construct
  source 1..21: mol_type = other RNA
cacgtgaagacaggtgtcttg

SEQ ID NO: 66 - RNA, 22 nt, synthetic construct
  source 1..22: mol_type = other RNA
ccacgtgaagacaggtgtcttg

SEQ ID NO: 67-71 - skipped (5 entries)

SEQ ID NO: 72 - RNA, 10 nt, synthetic construct
  source 1..10: mol_type = other RNA
gacacctgtc

SEQ ID NO: 73 - RNA, 11 nt, synthetic construct
  source 1..11: mol_type = other RNA
gacacctgtct

SEQ ID NO: 74 - RNA, 12 nt, synthetic construct
  source 1..12: mol_type = other RNA
gacacctgtctt

SEQ ID NO: 75 - RNA, 13 nt, synthetic construct
  source 1..13: mol_type = other RNA
gacacctgtcttc

SEQ ID NO: 76 - RNA, 14 nt, synthetic construct
  source 1..14: mol_type = other RNA
gacacctgtcttca

SEQ ID NO: 77 - RNA, 15 nt, synthetic construct
  source 1..15: mol_type = other RNA
gacacctgtcttcac

SEQ ID NO: 78 - RNA, 16 nt, synthetic construct
  source 1..16: mol_type = other RNA
gacacctgtcttcacg

SEQ ID NO: 79 - RNA, 17 nt, synthetic construct
  source 1..17: mol_type = other RNA
gacacctgtcttcacgt

SEQ ID NO: 80 - RNA, 18 nt, synthetic construct
  source 1..18: mol_type = other RNA
gacacctgtcttcacgtg

SEQ ID NO: 81 - RNA, 19 nt, synthetic construct
  source 1..19: mol_type = other RNA
gacacctgtcttcacgtgg

SEQ ID NO: 82 - RNA, 30 nt, synthetic construct
  source 1..30: mol_type = other RNA
gatcaggcttccactttggaaacacagcaa

SEQ ID NO: 83 - RNA, 30 nt, synthetic construct
  source 1..30: mol_type = other RNA
gatcaggcttccactttggaaacccagcaa

SEQ ID NO: 84 - RNA, 30 nt, synthetic construct
  source 1..30: mol_type = other RNA
gatcaggcttccactttggaaacgcagcaa

SEQ ID NO: 85 - RNA, 30 nt, synthetic construct
  source 1..30: mol_type = other RNA
gatcaggcttccactttggaaactcagcaa

SEQ ID NO: 86 - RNA, 31 nt, synthetic construct
  source 1..31: mol_type = other RNA
ggatcaggcttccactttggaaacacagcaa

SEQ ID NO: 87 - RNA, 31 nt, synthetic construct
  source 1..31: mol_type = other RNA
ggatcaggcttccactttggaaacccagcaa

SEQ ID NO: 88 - RNA, 31 nt, synthetic construct
  source 1..31: mol_type = other RNA
ggatcaggcttccactttggaaacgcagcaa

SEQ ID NO: 89 - RNA, 31 nt, synthetic construct
  source 1..31: mol_type = other RNA
ggatcaggcttccactttggaaactcagcaa

SEQ ID NO: 90 - RNA, 32 nt, synthetic construct
  source 1..32: mol_type = other RNA
gggatcaggcttccactttggaaacacagcaa

SEQ ID NO: 91 - RNA, 32 nt, synthetic construct
  source 1..32: mol_type = other RNA
gggatcaggcttccactttggaaacccagcaa

SEQ ID NO: 92 - RNA, 32 nt, synthetic construct
  source 1..32: mol_type = other RNA
gggatcaggcttccactttggaaacgcagcaa

SEQ ID NO: 93 - RNA, 32 nt, synthetic construct
  source 1..32: mol_type = other RNA
gggatcaggcttccactttggaaactcagcaa

SEQ ID NO: 94 - RNA, 33 nt, synthetic construct
  source 1..33: mol_type = other RNA
tgggatcaggcttccactttggaaacacagcaa

SEQ ID NO: 95 - RNA, 33 nt, synthetic construct
  source 1..33: mol_type = other RNA
tgggatcaggcttccactttggaaacccagcaa

SEQ ID NO: 96 - RNA, 33 nt, synthetic construct
  source 1..33: mol_type = other RNA
tgggatcaggcttccactttggaaacgcagcaa

SEQ ID NO: 97 - RNA, 33 nt, synthetic construct
  source 1..33: mol_type = other RNA
tgggatcaggcttccactttggaaactcagcaa

SEQ ID NO: 98 - RNA, 34 nt, synthetic construct
  source 1..34: mol_type = other RNA
atgggatcaggcttccactttggaaacacagcaa

SEQ ID NO: 99 - RNA, 34 nt, synthetic construct
  source 1..34: mol_type = other RNA
atgggatcaggcttccactttggaaacccagcaa

SEQ ID NO: 100 - RNA, 34 nt, synthetic construct
  source 1..34: mol_type = other RNA
atgggatcaggcttccactttggaaacgcagcaa

SEQ ID NO: 101 - RNA, 34 nt, synthetic construct
  source 1..34: mol_type = other RNA
atgggatcaggcttccactttggaaactcagcaa

SEQ ID NO: 102 - RNA, 35 nt, synthetic construct
  source 1..35: mol_type = other RNA
tatgggatcaggcttccactttggaaacacagcaa

SEQ ID NO: 103 - RNA, 35 nt, synthetic construct
  source 1..35: mol_type = other RNA
tatgggatcaggcttccactttggaaacccagcaa

SEQ ID NO: 104 - RNA, 35 nt, synthetic construct
  source 1..35: mol_type = other RNA
tatgggatcaggcttccactttggaaacgcagcaa

SEQ ID NO: 105 - RNA, 35 nt, synthetic construct
  source 1..35: mol_type = other RNA
tatgggatcaggcttccactttggaaactcagcaa

SEQ ID NO: 106 - RNA, 36 nt, synthetic construct
  source 1..36: mol_type = other RNA
gtatgggatcaggcttccactttggaaacacagcaa

SEQ ID NO: 107 - RNA, 36 nt, synthetic construct
  source 1..36: mol_type = other RNA
gtatgggatcaggcttccactttggaaacccagcaa

SEQ ID NO: 108 - RNA, 36 nt, synthetic construct
  source 1..36: mol_type = other RNA
gtatgggatcaggcttccactttggaaacgcagcaa

SEQ ID NO: 109 - RNA, 36 nt, synthetic construct
  source 1..36: mol_type = other RNA
gtatgggatcaggcttccactttggaaactcagcaa

SEQ ID NO: 110 - RNA, 37 nt, synthetic construct
  source 1..37: mol_type = other RNA
tgtatgggatcaggcttccactttggaaacacagcaa

SEQ ID NO: 111 - RNA, 37 nt, synthetic construct
  source 1..37: mol_type = other RNA
tgtatgggatcaggcttccactttggaaacccagcaa

SEQ ID NO: 112 - RNA, 37 nt, synthetic construct
  source 1..37: mol_type = other RNA
tgtatgggatcaggcttccactttggaaacgcagcaa

SEQ ID NO: 113 - RNA, 37 nt, synthetic construct
  source 1..37: mol_type = other RNA
tgtatgggatcaggcttccactttggaaactcagcaa

SEQ ID NO: 114 - RNA, 38 nt, synthetic construct
  source 1..38: mol_type = other RNA
ctgtatgggatcaggcttccactttggaaacacagcaa

SEQ ID NO: 115 - RNA, 38 nt, synthetic construct
  source 1..38: mol_type = other RNA
ctgtatgggatcaggcttccactttggaaacccagcaa

SEQ ID NO: 116 - RNA, 38 nt, synthetic construct
  source 1..38: mol_type = other RNA
ctgtatgggatcaggcttccactttggaaacgcagcaa

SEQ ID NO: 117 - RNA, 38 nt, synthetic construct
  source 1..38: mol_type = other RNA
ctgtatgggatcaggcttccactttggaaactcagcaa

SEQ ID NO: 118 - RNA, 39 nt, synthetic construct
  source 1..39: mol_type = other RNA
tctgtatgggatcaggcttccactttggaaacacagcaa

SEQ ID NO: 119 - RNA, 39 nt, synthetic construct
  source 1..39: mol_type = other RNA
tctgtatgggatcaggcttccactttggaaacccagcaa

SEQ ID NO: 120 - RNA, 39 nt, synthetic construct
  source 1..39: mol_type = other RNA
tctgtatgggatcaggcttccactttggaaacgcagcaa

SEQ ID NO: 121 - RNA, 39 nt, synthetic construct
  source 1..39: mol_type = other RNA
tctgtatgggatcaggcttccactttggaaactcagcaa

SEQ ID NO: 122 - RNA, 40 nt, synthetic construct
  source 1..40: mol_type = other RNA
ttctgtatgggatcaggcttccactttggaaacacagcaa

SEQ ID NO: 123 - RNA, 40 nt, synthetic construct
  source 1..40: mol_type = other RNA
ttctgtatgggatcaggcttccactttggaaacccagcaa

SEQ ID NO: 124 - RNA, 40 nt, synthetic construct
  source 1..40: mol_type = other RNA
ttctgtatgggatcaggcttccactttggaaacgcagcaa

SEQ ID NO: 125 - RNA, 40 nt, synthetic construct
  source 1..40: mol_type = other RNA
ttctgtatgggatcaggcttccactttggaaactcagcaa

SEQ ID NO: 126 - RNA, 20 nt, synthetic construct
  source 1..20: mol_type = other RNA
accttttcgctttttccaag

SEQ ID NO: 127 - RNA, 20 nt, synthetic construct
  source 1..20: mol_type = other RNA
agaagctttctgtatgggat

SEQ ID NO: 128 - RNA, 20 nt, synthetic construct
  source 1..20: mol_type = other RNA
agtagatctttcttgtgatt

SEQ ID NO: 129 - RNA, 20 nt, synthetic construct
  source 1..20: mol_type = other RNA
catcaccttttcgctttttc

SEQ ID NO: 130 - RNA, 20 nt, synthetic construct
  source 1..20: mol_type = other RNA
ccaagatggctcaagattca

SEQ ID NO: 131 - RNA, 20 nt, synthetic construct
  source 1..20: mol_type = other RNA
ctttcttgtgattatcagtt

SEQ ID NO: 132 - RNA, 20 nt, synthetic construct
  source 1..20: mol_type = other RNA
tatgggatcaggcttccact

SEQ ID NO: 133 - RNA, 20 nt, synthetic construct
  source 1..20: mol_type = other RNA
tcgctttttccaagatggct

SEQ ID NO: 134 - RNA, 20 nt, synthetic construct
  source 1..20: mol_type = other RNA
tggatgcagaagctttctgt

SEQ ID NO: 135 - RNA, 20 nt, synthetic construct
  source 1..20: mol_type = other RNA
ttttccaagatggctcaaga

SEQ ID NO: 136 - RNA, 17 nt, synthetic construct
  source 1..17: mol_type = other RNA
agctttctgtatggatc

SEQ ID NO: 137 - RNA, 18 nt, synthetic construct
  source 1..18: mol_type = other RNA
aagctttctgtatggatc

SEQ ID NO: 138 - RNA, 19 nt, synthetic construct
  source 1..19: mol_type = other RNA
gaagctttctgtatggatc

SEQ ID NO: 139 - RNA, 20 nt, synthetic construct
  source 1..20: mol_type = other RNA
agaagctttctgtatggatc

SEQ ID NO: 140 - RNA, 21 nt, synthetic construct
  source 1..21: mol_type = other RNA
cagaagctttctgtatggatc

SEQ ID NO: 141 - RNA, 22 nt, synthetic construct
  source 1..22: mol_type = other RNA
gcagaagctttctgtatggatc

SEQ ID NO: 142-146 - skipped (5 entries)

SEQ ID NO: 147 - RNA, 10 nt, synthetic construct
  source 1..10: mol_type = other RNA
ccatacagaa

SEQ ID NO: 148 - RNA, 11 nt, synthetic construct
  source 1..11: mol_type = other RNA
ccatacagaaa

SEQ ID NO: 149 - RNA, 12 nt, synthetic construct
  source 1..12: mol_type = other RNA
ccatacagaaag

SEQ ID NO: 150 - RNA, 13 nt, synthetic construct
  source 1..13: mol_type = other RNA
ccatacagaaagc

SEQ ID NO: 151 - RNA, 14 nt, synthetic construct
  source 1..14: mol_type = other RNA
ccatacagaaagct

SEQ ID NO: 152 - RNA, 15 nt, synthetic construct
  source 1..15: mol_type = other RNA
ccatacagaaagctt

SEQ ID NO: 153 - RNA, 16 nt, synthetic construct
  source 1..16: mol_type = other RNA
ccatacagaaagcttc

SEQ ID NO: 154 - RNA, 17 nt, synthetic construct
  source 1..17: mol_type = other RNA
ccatacagaaagcttct

SEQ ID NO: 155 - RNA, 18 nt, synthetic construct
  source 1..18: mol_type = other RNA
ccatacagaaagcttctg

SEQ ID NO: 156 - RNA, 19 nt, synthetic construct
  source 1..19: mol_type = other RNA
ccatacagaaagcttctgc

SEQ ID NO: 157 - RNA, 10 nt, synthetic construct
  source 1..10: mol_type = other RNA
aagcctgatc

SEQ ID NO: 158 - RNA, 10 nt, synthetic construct
  source 1..10: mol_type = other RNA
aagcttgatc

SEQ ID NO: 159 - RNA, 11 nt, synthetic construct
  source 1..11: mol_type = other RNA
gaagcctgatc

SEQ ID NO: 160 - RNA, 12 nt, synthetic construct
  source 1..12: mol_type = other RNA
ggaagcctgatc

SEQ ID NO: 161 - RNA, 12 nt, synthetic construct
  source 1..12: mol_type = other RNA
ggaagcttgatc

SEQ ID NO: 162 - RNA, 13 nt, synthetic construct
  source 1..13: mol_type = other RNA
tggaagcctgatc

SEQ ID NO: 163 - RNA, 14 nt, synthetic construct
  source 1..14: mol_type = other RNA
gtggaagcctgatc

SEQ ID NO: 164 - RNA, 14 nt, synthetic construct
  source 1..14: mol_type = other RNA
gtggaagcttgatc

SEQ ID NO: 165 - RNA, 15 nt, synthetic construct
  source 1..15: mol_type = other RNA
agtggaagcctgatc

SEQ ID NO: 166 - RNA, 16 nt, synthetic construct
  source 1..16: mol_type = other RNA
aagtggaagcctgatc

SEQ ID NO: 167 - RNA, 16 nt, synthetic construct
  source 1..16: mol_type = other RNA
aagtggaagcttgatc

SEQ ID NO: 168 - RNA, 17 nt, synthetic construct
  source 1..17: mol_type = other RNA
aaagtggaagcctgatc

SEQ ID NO: 169 - RNA, 18 nt, synthetic construct
  source 1..18: mol_type = other RNA
caaagtggaagcctgatc

SEQ ID NO: 170 - RNA, 19 nt, synthetic construct
  source 1..19: mol_type = other RNA
ccaaagtggaagcctgatc

SEQ ID NO: 171 - RNA, 20 nt, synthetic construct
  source 1..20: mol_type = other RNA
tccaaagtggaagcctgatc

SEQ ID NO: 172 - RNA, 21 nt, synthetic construct
  source 1..21: mol_type = other RNA
ttccaaagtggaagcctgatc

SEQ ID NO: 173 - RNA, 22 nt, synthetic construct
  source 1..22: mol_type = other RNA
tttccaaagtggaagcctgatc

SEQ ID NO: 174 - RNA, 23 nt, synthetic construct
  source 1..23: mol_type = other RNA
gtttccaaagtggaagcctgatc

SEQ ID NO: 175 - RNA, 24 nt, synthetic construct
  source 1..24: mol_type = other RNA
ggtttccaaagtggaagcctgatc

SEQ ID NO: 176 - RNA, 25 nt, synthetic construct
  source 1..25: mol_type = other RNA
gggtttccaaagtggaagcctgatc

SEQ ID NO: 177 - RNA, 26 nt, synthetic construct
  source 1..26: mol_type = other RNA
tgggtttccaaagtggaagcctgatc

SEQ ID NO: 178 - RNA, 27 nt, synthetic construct
  source 1..27: mol_type = other RNA
ctgggtttccaaagtggaagcctgatc

SEQ ID NO: 179 - RNA, 28 nt, synthetic construct
  source 1..28: mol_type = other RNA
gctgggtttccaaagtggaagcctgatc

SEQ ID NO: 180 - RNA, 29 nt, synthetic construct
  source 1..29: mol_type = other RNA
tgctgggtttccaaagtggaagcctgatc

SEQ ID NO: 181 - RNA, 30 nt, synthetic construct
  source 1..30: mol_type = other RNA
ttgctgggtttccaaagtggaagcctgatc

SEQ ID NO: 182 - RNA, 30 nt, synthetic construct
  source 1..30: mol_type = other RNA
ttgctgggtttccaaagtggaagcttgatc

SEQ ID NO: 183 - RNA, 31 nt, synthetic construct
  source 1..31: mol_type = other RNA
cttgctgggtttccaaagtggaagcctgatc

SEQ ID NO: 184 - RNA, 32 nt, synthetic construct
  source 1..32: mol_type = other RNA
tcttgctgggtttccaaagtggaagcctgatc

SEQ ID NO: 185 - RNA, 32 nt, synthetic construct
  source 1..32: mol_type = other RNA
tcttgctgggtttccaaagtggaagcttgatc

SEQ ID NO: 186 - RNA, 33 nt, synthetic construct
  source 1..33: mol_type = other RNA
gtcttgctgggtttccaaagtggaagcctgatc

SEQ ID NO: 187 - RNA, 34 nt, synthetic construct
  source 1..34: mol_type = other RNA
tgtcttgctgggtttccaaagtggaagcctgatc

SEQ ID NO: 188 - RNA, 34 nt, synthetic construct
  source 1..34: mol_type = other RNA
tgtcttgctgggtttccaaagtggaagcttgatc

SEQ ID NO: 189 - RNA, 35 nt, synthetic construct
  source 1..35: mol_type = other RNA
gtgtcttgctgggtttccaaagtggaagcctgatc

SEQ ID NO: 190 - RNA, 36 nt, synthetic construct
  source 1..36: mol_type = other RNA
ggtgtcttgctgggtttccaaagtggaagcctgatc

SEQ ID NO: 191 - RNA, 37 nt, synthetic construct
  source 1..37: mol_type = other RNA
aggtgtcttgctgggtttccaaagtggaagcctgatc

SEQ ID NO: 192 - RNA, 38 nt, synthetic construct
  source 1..38: mol_type = other RNA
caggtgtcttgctgggtttccaaagtggaagcctgatc

SEQ ID NO: 193 - RNA, 39 nt, synthetic construct
  source 1..39: mol_type = other RNA
acaggtgtcttgctgggtttccaaagtggaagcctgatc

SEQ ID NO: 194 - RNA, 40 nt, synthetic construct
  source 1..40: mol_type = other RNA
gacaggtgtcttgctgggtttccaaagtggaagcctgatc

SEQ ID NO: 195 - RNA, 20 nt, synthetic construct
  source 1..20: mol_type = other RNA
acatcttccttaggaactcc

SEQ ID NO: 196 - RNA, 20 nt, synthetic construct
  source 1..20: mol_type = other RNA
actacttaccatctctttca

SEQ ID NO: 197 - RNA, 20 nt, synthetic construct
  source 1..20: mol_type = other RNA
actcctggaactgagccacg

SEQ ID NO: 198 - RNA, 20 nt, synthetic construct
  source 1..20: mol_type = other RNA
agaaaataatttcattattc

SEQ ID NO: 199 - RNA, 20 nt, synthetic construct
  source 1..20: mol_type = other RNA
aggcttcatacatcttcctt

SEQ ID NO: 200 - RNA, 20 nt, synthetic construct
  source 1..20: mol_type = other RNA
catcttccttaggaactcct

SEQ ID NO: 201 - RNA, 20 nt, synthetic construct
  source 1..20: mol_type = other RNA
ccacgtgaagacaggtgtct

SEQ ID NO: 202 - RNA, 20 nt, synthetic construct
  source 1..20: mol_type = other RNA
cctggaactgagccacgtga

SEQ ID NO: 203 - RNA, 20 nt, synthetic construct
  source 1..20: mol_type = other RNA
cgtgaagacaggtgtcttgc

SEQ ID NO: 204 - RNA, 20 nt, synthetic construct
  source 1..20: mol_type = other RNA
ctacttaccatctctttcaa

SEQ ID NO: 205 - RNA, 20 nt, synthetic construct
  source 1..20: mol_type = other RNA
ctgagccacgtgaagacagg

SEQ ID NO: 206 - RNA, 20 nt, synthetic construct
  source 1..20: mol_type = other RNA
cttaggaactcctggaactg

SEQ ID NO: 207 - RNA, 20 nt, synthetic construct
  source 1..20: mol_type = other RNA
gaaaataatttcattattct

SEQ ID NO: 208 - RNA, 20 nt, synthetic construct
  source 1..20: mol_type = other RNA
gaactcctggaactgagcca

SEQ ID NO: 209 - RNA, 20 nt, synthetic construct
  source 1..20: mol_type = other RNA
gaactgagccacgtgaagac

SEQ ID NO: 210 - RNA, 20 nt, synthetic construct
  source 1..20: mol_type = other RNA
ggcttcatacatcttcctta

SEQ ID NO: 211 - RNA, 20 nt, synthetic construct
  source 1..20: mol_type = other RNA
gggtttccaaagtggaagcc

SEQ ID NO: 212 - RNA, 20 nt, synthetic construct
  source 1..20: mol_type = other RNA
gtcttgctgggtttccaaag

SEQ ID NO: 213 - RNA, 20 nt, synthetic construct
  source 1..20: mol_type = other RNA
gtgaagacaggtgtcttgct

SEQ ID NO: 214 - RNA, 20 nt, synthetic construct
  source 1..20: mol_type = other RNA
gtgtcttgctgggtttccaa

SEQ ID NO: 215 - RNA, 20 nt, synthetic construct
  source 1..20: mol_type = other RNA
tccttaggaactcctggaac

SEQ ID NO: 216 - RNA, 20 nt, synthetic construct
  source 1..20: mol_type = other RNA
tcttgctgggtttccaaagt

SEQ ID NO: 217 - RNA, 20 nt, synthetic construct
  source 1..20: mol_type = other RNA
tgaagacaggtgtcttgctg

SEQ ID NO: 218 - RNA, 20 nt, synthetic construct
  source 1..20: mol_type = other RNA
tgctgggtttccaaagtgga

SEQ ID NO: 219 - RNA, 114 nt, synthetic construct
  source 1..114: mol_type = other RNA
agaagctttctgtatggatcgttttagagctagaaatagcaagttaaaataaggctagtccgttatcaacttgaaaaagtggcaccgagtcggtgcaagcctgatcccatacag

SEQ ID NO: 220 - RNA, 114 nt, synthetic construct
  source 1..114: mol_type = other RNA
agaagctttctgtatggatcgttttagagctagaaatagcaagttaaaataaggctagtccgttatcaacttgaaaaagtggcaccgagtcggtgcaagcttgatcccatacag

SEQ ID NO: 221 - RNA, 116 nt, synthetic construct
  source 1..116: mol_type = other RNA
agaagctttctgtatggatcgttttagagctagaaatagcaagttaaaataaggctagtccgttatcaacttgaaaaagtggcaccgagtcggtgcaagcctgatcccatacagaa

SEQ ID NO: 222 - RNA, 116 nt, synthetic construct
  source 1..116: mol_type = other RNA
agaagctttctgtatggatcgttttagagctagaaatagcaagttaaaataaggctagtccgttatcaacttgaaaaagtggcaccgagtcggtgcggaagcctgatcccatacag

SEQ ID NO: 223 - RNA, 116 nt, synthetic construct
  source 1..116: mol_type = other RNA
agaagctttctgtatggatcgttttagagctagaaatagcaagttaaaataaggctagtccgttatcaacttgaaaaagtggcaccgagtcggtgcaagcttgatcccatacagaa

SEQ ID NO: 224 - RNA, 116 nt, synthetic construct
  source 1..116: mol_type = other RNA
agaagctttctgtatggatcgttttagagctagaaatagcaagttaaaataaggctagtccgttatcaacttgaaaaagtggcaccgagtcggtgcggaagcttgatcccatacag

SEQ ID NO: 225 - RNA, 118 nt, synthetic construct
  source 1..118: mol_type = other RNA
agaagctttctgtatggatcgttttagagctagaaatagcaagttaaaataaggctagtccgttatcaacttgaaaaagtggcaccgagtcggtgcaagcctgatcccatacagaaag

SEQ ID NO: 226 - RNA, 118 nt, synthetic construct
  source 1..118: mol_type = other RNA
agaagctttctgtatggatcgttttagagctagaaatagcaagttaaaataaggctagtccgttatcaacttgaaaaagtggcaccgagtcggtgcggaagcctgatcccatacagaa

SEQ ID NO: 227 - RNA, 118 nt, synthetic construct
  source 1..118: mol_type = other RNA
agaagctttctgtatggatcgttttagagctagaaatagcaagttaaaataaggctagtccgttatcaacttgaaaaagtggcaccgagtcggtgcgtggaagcctgatcccatacag

SEQ ID NO: 228 - RNA, 118 nt, synthetic construct
  source 1..118: mol_type = other RNA
agaagctttctgtatggatcgttttagagctagaaatagcaagttaaaataaggctagtccgttatcaacttgaaaaagtggcaccgagtcggtgcaagcctgatcccatacagtttt

SEQ ID NO: 229 - RNA, 118 nt, synthetic construct
  source 1..118: mol_type = other RNA
agaagctttctgtatggatcgttttagagctagaaatagcaagttaaaataaggctagtccgttatcaacttgaaaaagtggcaccgagtcggtgcaagcttgatcccatacagtttt

SEQ ID NO: 230 - RNA, 118 nt, synthetic construct
  source 1..118: mol_type = other RNA
agaagctttctgtatggatcgttttagagctagaaatagcaagttaaaataaggctagtccgttatcaacttgaaaaagtggcaccgagtcggtgcaagcttgatcccatacagaaag

SEQ ID NO: 231 - RNA, 118 nt, synthetic construct
  source 1..118: mol_type = other RNA
agaagctttctgtatggatcgttttagagctagaaatagcaagttaaaataaggctagtccgttatcaacttgaaaaagtggcaccgagtcggtgcggaagcttgatcccatacagaa

SEQ ID NO: 232 - RNA, 118 nt, synthetic construct
  source 1..118: mol_type = other RNA
agaagctttctgtatggatcgttttagagctagaaatagcaagttaaaataaggctagtccgttatcaacttgaaaaagtggcaccgagtcggtgcgtggaagcttgatcccatacag

SEQ ID NO: 233 - RNA, 119 nt, synthetic construct
  source 1..119: mol_type = other RNA
gagaagctttctgtatggatcgttttagagctagaaatagcaagttaaaataaggctagtccgttatcaacttgaaaaagtggcaccgagtcggtgcaagcctgatcccatacagtttt

SEQ ID NO: 234 - RNA, 120 nt, synthetic construct
  source 1..120: mol_type = other RNA
agaagctttctgtatggatcgttttagagctagaaatagcaagttaaaataaggctagtccgttatcaacttgaaaaagtggcaccgagtcggtgcaagcctgatcccatacagaaagct

SEQ ID NO: 235 - RNA, 120 nt, synthetic construct
  source 1..120: mol_type = other RNA
agaagctttctgtatggatcgttttagagctagaaatagcaagttaaaataaggctagtccgttatcaacttgaaaaagtggcaccgagtcggtgcggaagcctgatcccatacagaaag

SEQ ID NO: 236 - RNA, 120 nt, synthetic construct
  source 1..120: mol_type = other RNA
agaagctttctgtatggatcgttttagagctagaaatagcaagttaaaataaggctagtccgttatcaacttgaaaaagtggcaccgagtcggtgcgtggaagcctgatcccatacagaa

SEQ ID NO: 237 - RNA, 120 nt, synthetic construct
  source 1..120: mol_type = other RNA
agaagctttctgtatggatcgttttagagctagaaatagcaagttaaaataaggctagtccgttatcaacttgaaaaagtggcaccgagtcggtgcaagtggaagcctgatcccatacag

SEQ ID NO: 238 - RNA, 120 nt, synthetic construct
  source 1..120: mol_type = other RNA
agaagctttctgtatggatcgttttagagctagaaatagcaagttaaaataaggctagtccgttatcaacttgaaaaagtggcaccgagtcggtgcaagcctgatcccatacagaatttt

SEQ ID NO: 239 - RNA, 120 nt, synthetic construct
  source 1..120: mol_type = other RNA
agaagctttctgtatggatcgttttagagctagaaatagcaagttaaaataaggctagtccgttatcaacttgaaaaagtggcaccgagtcggtgcggaagcctgatcccatacagtttt

SEQ ID NO: 240 - RNA, 120 nt, synthetic construct
  source 1..120: mol_type = other RNA
agaagctttctgtatggatcgttttagagctagaaatagcaagttaaaataaggctagtccgttatcaacttgaaaaagtggcaccgagtcggtgcaagcttgatcccatacagaatttt

SEQ ID NO: 241 - RNA, 120 nt, synthetic construct
  source 1..120: mol_type = other RNA
agaagctttctgtatggatcgttttagagctagaaatagcaagttaaaataaggctagtccgttatcaacttgaaaaagtggcaccgagtcggtgcggaagcttgatcccatacagtttt

SEQ ID NO: 242 - RNA, 120 nt, synthetic construct
  source 1..120: mol_type = other RNA
agaagctttctgtatggatcgttttagagctagaaatagcaagttaaaataaggctagtccgttatcaacttgaaaaagtggcaccgagtcggtgcaagcttgatcccatacagaaagct

SEQ ID NO: 243 - RNA, 120 nt, synthetic construct
  source 1..120: mol_type = other RNA
agaagctttctgtatggatcgttttagagctagaaatagcaagttaaaataaggctagtccgttatcaacttgaaaaagtggcaccgagtcggtgcggaagcttgatcccatacagaaag

SEQ ID NO: 244 - RNA, 120 nt, synthetic construct
  source 1..120: mol_type = other RNA
agaagctttctgtatggatcgttttagagctagaaatagcaagttaaaataaggctagtccgttatcaacttgaaaaagtggcaccgagtcggtgcgtggaagcttgatcccatacagaa

SEQ ID NO: 245 - RNA, 120 nt, synthetic construct
  source 1..120: mol_type = other RNA
agaagctttctgtatggatcgttttagagctagaaatagcaagttaaaataaggctagtccgttatcaacttgaaaaagtggcaccgagtcggtgcaagtggaagcttgatcccatacag

SEQ ID NO: 246 - RNA, 121 nt, synthetic construct
  source 1..121: mol_type = other RNA
gagaagctttctgtatggatcgttttagagctagaaatagcaagttaaaataaggctagtccgttatcaacttgaaaaagtggcaccgagtcggtgcaagcctgatcccatacagaatttt

SEQ ID NO: 247 - RNA, 121 nt, synthetic construct
  source 1..121: mol_type = other RNA
gagaagctttctgtatggatcgttttagagctagaaatagcaagttaaaataaggctagtccgttatcaacttgaaaaagtggcaccgagtcggtgcggaagcctgatcccatacagtttt

SEQ ID NO: 248 - RNA, 122 nt, synthetic construct
  source 1..122: mol_type = other RNA
agaagctttctgtatggatcgttttagagctagaaatagcaagttaaaataaggctagtccgttatcaacttgaaaaagtggcaccgagtcggtgcggaagcctgatcccatacagaaagct

SEQ ID NO: 249 - RNA, 122 nt, synthetic construct
  source 1..122: mol_type = other RNA
agaagctttctgtatggatcgttttagagctagaaatagcaagttaaaataaggctagtccgttatcaacttgaaaaagtggcaccgagtcggtgcgtggaagcctgatcccatacagaaag

SEQ ID NO: 250 - RNA, 122 nt, synthetic construct
  source 1..122: mol_type = other RNA
agaagctttctgtatggatcgttttagagctagaaatagcaagttaaaataaggctagtccgttatcaacttgaaaaagtggcaccgagtcggtgcaagtggaagcctgatcccatacagaa

SEQ ID NO: 251 - RNA, 122 nt, synthetic construct
  source 1..122: mol_type = other RNA
agaagctttctgtatggatcgttttagagctagaaatagcaagttaaaataaggctagtccgttatcaacttgaaaaagtggcaccgagtcggtgcaagcctgatcccatacagaaagtttt

SEQ ID NO: 252 - RNA, 122 nt, synthetic construct
  source 1..122: mol_type = other RNA
agaagctttctgtatggatcgttttagagctagaaatagcaagttaaaataaggctagtccgttatcaacttgaaaaagtggcaccgagtcggtgcggaagcctgatcccatacagaatttt

SEQ ID NO: 253 - RNA, 122 nt, synthetic construct
  source 1..122: mol_type = other RNA
agaagctttctgtatggatcgttttagagctagaaatagcaagttaaaataaggctagtccgttatcaacttgaaaaagtggcaccgagtcggtgcgtggaagcctgatcccatacagtttt

SEQ ID NO: 254 - RNA, 122 nt, synthetic construct
  source 1..122: mol_type = other RNA
agaagctttctgtatggatcgttttagagctagaaatagcaagttaaaataaggctagtccgttatcaacttgaaaaagtggcaccgagtcggtgcaagcttgatcccatacagaaagtttt

SEQ ID NO: 255 - RNA, 122 nt, synthetic construct
  source 1..122: mol_type = other RNA
agaagctttctgtatggatcgttttagagctagaaatagcaagttaaaataaggctagtccgttatcaacttgaaaaagtggcaccgagtcggtgcggaagcttgatcccatacagaatttt

SEQ ID NO: 256 - RNA, 122 nt, synthetic construct
  source 1..122: mol_type = other RNA
agaagctttctgtatggatcgttttagagctagaaatagcaagttaaaataaggctagtccgttatcaacttgaaaaagtggcaccgagtcggtgcgtggaagcttgatcccatacagtttt

SEQ ID NO: 257 - RNA, 122 nt, synthetic construct
  source 1..122: mol_type = other RNA
agaagctttctgtatggatcgttttagagctagaaatagcaagttaaaataaggctagtccgttatcaacttgaaaaagtggcaccgagtcggtgcggaagcttgatcccatacagaaagct

SEQ ID NO: 258 - RNA, 122 nt, synthetic construct
  source 1..122: mol_type = other RNA
agaagctttctgtatggatcgttttagagctagaaatagcaagttaaaataaggctagtccgttatcaacttgaaaaagtggcaccgagtcggtgcgtggaagcttgatcccatacagaaag

SEQ ID NO: 259 - RNA, 122 nt, synthetic construct
  source 1..122: mol_type = other RNA
agaagctttctgtatggatcgttttagagctagaaatagcaagttaaaataaggctagtccgttatcaacttgaaaaagtggcaccgagtcggtgcaagtggaagcttgatcccatacagaa

SEQ ID NO: 260 - RNA, 123 nt, synthetic construct
  source 1..123: mol_type = other RNA
gagaagctttctgtatggatcgttttagagctagaaatagcaagttaaaataaggctagtccgttatcaacttgaaaaagtggcaccgagtcggtgcaagcctgatcccatacagaaagtttt

SEQ ID NO: 261 - RNA, 123 nt, synthetic construct
  source 1..123: mol_type = other RNA
gagaagctttctgtatggatcgttttagagctagaaatagcaagttaaaataaggctagtccgttatcaacttgaaaaagtggcaccgagtcggtgcggaagcctgatcccatacagaatttt

SEQ ID NO: 262 - RNA, 123 nt, synthetic construct
  source 1..123: mol_type = other RNA
gagaagctttctgtatggatcgttttagagctagaaatagcaagttaaaataaggctagtccgttatcaacttgaaaaagtggcaccgagtcggtgcgtggaagcctgatcccatacagtttt

SEQ ID NO: 263 - RNA, 124 nt, synthetic construct
  source 1..124: mol_type = other RNA
agaagctttctgtatggatcgttttagagctagaaatagcaagttaaaataaggctagtccgttatcaacttgaaaaagtggcaccgagtcggtgcgtggaagcctgatcccatacagaaagct

SEQ ID NO: 264 - RNA, 124 nt, synthetic construct
  source 1..124: mol_type = other RNA
agaagctttctgtatggatcgttttagagctagaaatagcaagttaaaataaggctagtccgttatcaacttgaaaaagtggcaccgagtcggtgcaagtggaagcctgatcccatacagaaag

SEQ ID NO: 265 - RNA, 124 nt, synthetic construct
  source 1..124: mol_type = other RNA
agaagctttctgtatggatcgttttagagctagaaatagcaagttaaaataaggctagtccgttatcaacttgaaaaagtggcaccgagtcggtgcaagcctgatcccatacagaaagcttttt

SEQ ID NO: 266 - RNA, 124 nt, synthetic construct
  source 1..124: mol_type = other RNA
agaagctttctgtatggatcgttttagagctagaaatagcaagttaaaataaggctagtccgttatcaacttgaaaaagtggcaccgagtcggtgcggaagcctgatcccatacagaaagtttt

SEQ ID NO: 267 - RNA, 124 nt, synthetic construct
  source 1..124: mol_type = other RNA
agaagctttctgtatggatcgttttagagctagaaatagcaagttaaaataaggctagtccgttatcaacttgaaaaagtggcaccgagtcggtgcgtggaagcctgatcccatacagaatttt

SEQ ID NO: 268 - RNA, 124 nt, synthetic construct
  source 1..124: mol_type = other RNA
agaagctttctgtatggatcgttttagagctagaaatagcaagttaaaataaggctagtccgttatcaacttgaaaaagtggcaccgagtcggtgcaagtggaagcctgatcccatacagtttt

SEQ ID NO: 269 - RNA, 124 nt, synthetic construct
  source 1..124: mol_type = other RNA
agaagctttctgtatggatcgttttagagctagaaatagcaagttaaaataaggctagtccgttatcaacttgaaaaagtggcaccgagtcggtgcaagcttgatcccatacagaaagcttttt

SEQ ID NO: 270 - RNA, 124 nt, synthetic construct
  source 1..124: mol_type = other RNA
agaagctttctgtatggatcgttttagagctagaaatagcaagttaaaataaggctagtccgttatcaacttgaaaaagtggcaccgagtcggtgcggaagcttgatcccatacagaaagtttt

SEQ ID NO: 271 - RNA, 124 nt, synthetic construct
  source 1..124: mol_type = other RNA
agaagctttctgtatggatcgttttagagctagaaatagcaagttaaaataaggctagtccgttatcaacttgaaaaagtggcaccgagtcggtgcgtggaagcttgatcccatacagaatttt

SEQ ID NO: 272 - RNA, 124 nt, synthetic construct
  source 1..124: mol_type = other RNA
agaagctttctgtatggatcgttttagagctagaaatagcaagttaaaataaggctagtccgttatcaacttgaaaaagtggcaccgagtcggtgcaagtggaagcttgatcccatacagtttt

SEQ ID NO: 273 - RNA, 124 nt, synthetic construct
  source 1..124: mol_type = other RNA
agaagctttctgtatggatcgttttagagctagaaatagcaagttaaaataaggctagtccgttatcaacttgaaaaagtggcaccgagtcggtgcgtggaagcttgatcccatacagaaagct

SEQ ID NO: 274 - RNA, 124 nt, synthetic construct
  source 1..124: mol_type = other RNA
agaagctttctgtatggatcgttttagagctagaaatagcaagttaaaataaggctagtccgttatcaacttgaaaaagtggcaccgagtcggtgcaagtggaagcttgatcccatacagaaag

SEQ ID NO: 275 - RNA, 125 nt, synthetic construct
  source 1..125: mol_type = other RNA
gagaagctttctgtatggatcgttttagagctagaaatagcaagttaaaataaggctagtccgttatcaacttgaaaaagtggcaccgagtcggtgcaagcctgatcccatacagaaagcttttt

SEQ ID NO: 276 - RNA, 125 nt, synthetic construct
  source 1..125: mol_type = other RNA
gagaagctttctgtatggatcgttttagagctagaaatagcaagttaaaataaggctagtccgttatcaacttgaaaaagtggcaccgagtcggtgcggaagcctgatcccatacagaaagtttt

SEQ ID NO: 277 - RNA, 125 nt, synthetic construct
  source 1..125: mol_type = other RNA
gagaagctttctgtatggatcgttttagagctagaaatagcaagttaaaataaggctagtccgttatcaacttgaaaaagtggcaccgagtcggtgcgtggaagcctgatcccatacagaatttt

SEQ ID NO: 278 - RNA, 125 nt, synthetic construct
  source 1..125: mol_type = other RNA
gagaagctttctgtatggatcgttttagagctagaaatagcaagttaaaataaggctagtccgttatcaacttgaaaaagtggcaccgagtcggtgcaagtggaagcctgatcccatacagtttt

SEQ ID NO: 279 - RNA, 126 nt, synthetic construct
  source 1..126: mol_type = other RNA
agaagctttctgtatggatcgttttagagctagaaatagcaagttaaaataaggctagtccgttatcaacttgaaaaagtggcaccgagtcggtgcaagtggaagcctgatcccatacagaaagct

SEQ ID NO: 280 - RNA, 126 nt, synthetic construct
  source 1..126: mol_type = other RNA
agaagctttctgtatggatcgttttagagctagaaatagcaagttaaaataaggctagtccgttatcaacttgaaaaagtggcaccgagtcggtgcggaagcctgatcccatacagaaagcttttt

SEQ ID NO: 281 - RNA, 126 nt, synthetic construct
  source 1..126: mol_type = other RNA
agaagctttctgtatggatcgttttagagctagaaatagcaagttaaaataaggctagtccgttatcaacttgaaaaagtggcaccgagtcggtgcgtggaagcctgatcccatacagaaagtttt

SEQ ID NO: 282 - RNA, 126 nt, synthetic construct
  source 1..126: mol_type = other RNA
agaagctttctgtatggatcgttttagagctagaaatagcaagttaaaataaggctagtccgttatcaacttgaaaaagtggcaccgagtcggtgcaagtggaagcctgatcccatacagaatttt

SEQ ID NO: 283 - RNA, 126 nt, synthetic construct
  source 1..126: mol_type = other RNA
agaagctttctgtatggatcgttttagagctagaaatagcaagttaaaataaggctagtccgttatcaacttgaaaaagtggcaccgagtcggtgcggaagcttgatcccatacagaaagcttttt

SEQ ID NO: 284 - RNA, 126 nt, synthetic construct
  source 1..126: mol_type = other RNA
agaagctttctgtatggatcgttttagagctagaaatagcaagttaaaataaggctagtccgttatcaacttgaaaaagtggcaccgagtcggtgcgtggaagcttgatcccatacagaaagtttt

SEQ ID NO: 285 - RNA, 126 nt, synthetic construct
  source 1..126: mol_type = other RNA
agaagctttctgtatggatcgttttagagctagaaatagcaagttaaaataaggctagtccgttatcaacttgaaaaagtggcaccgagtcggtgcaagtggaagcttgatcccatacagaatttt

SEQ ID NO: 286 - RNA, 126 nt, synthetic construct
  source 1..126: mol_type = other RNA
agaagctttctgtatggatcgttttagagctagaaatagcaagttaaaataaggctagtccgttatcaacttgaaaaagtggcaccgagtcggtgcaagtggaagcttgatcccatacagaaagct

SEQ ID NO: 287 - RNA, 127 nt, synthetic construct
  source 1..127: mol_type = other RNA
gagaagctttctgtatggatcgttttagagctagaaatagcaagttaaaataaggctagtccgttatcaacttgaaaaagtggcaccgagtcggtgcggaagcctgatcccatacagaaagcttttt

SEQ ID NO: 288 - RNA, 127 nt, synthetic construct
  source 1..127: mol_type = other RNA
gagaagctttctgtatggatcgttttagagctagaaatagcaagttaaaataaggctagtccgttatcaacttgaaaaagtggcaccgagtcggtgcgtggaagcctgatcccatacagaaagtttt

SEQ ID NO: 289 - RNA, 127 nt, synthetic construct
  source 1..127: mol_type = other RNA
gagaagctttctgtatggatcgttttagagctagaaatagcaagttaaaataaggctagtccgttatcaacttgaaaaagtggcaccgagtcggtgcaagtggaagcctgatcccatacagaatttt

SEQ ID NO: 290 - RNA, 128 nt, synthetic construct
  source 1..128: mol_type = other RNA
agaagctttctgtatggatcgttttagagctagaaatagcaagttaaaataaggctagtccgttatcaacttgaaaaagtggcaccgagtcggtgcgtggaagcctgatcccatacagaaagcttttt

SEQ ID NO: 291 - RNA, 128 nt, synthetic construct
  source 1..128: mol_type = other RNA
agaagctttctgtatggatcgttttagagctagaaatagcaagttaaaataaggctagtccgttatcaacttgaaaaagtggcaccgagtcggtgcaagtggaagcctgatcccatacagaaagtttt

SEQ ID NO: 292 - RNA, 128 nt, synthetic construct
  source 1..128: mol_type = other RNA
agaagctttctgtatggatcgttttagagctagaaatagcaagttaaaataaggctagtccgttatcaacttgaaaaagtggcaccgagtcggtgcgtggaagcttgatcccatacagaaagcttttt

SEQ ID NO: 293 - RNA, 128 nt, synthetic construct
  source 1..128: mol_type = other RNA
agaagctttctgtatggatcgttttagagctagaaatagcaagttaaaataaggctagtccgttatcaacttgaaaaagtggcaccgagtcggtgcaagtggaagcttgatcccatacagaaagtttt

SEQ ID NO: 294 - RNA, 129 nt, synthetic construct
  source 1..129: mol_type = other RNA
gagaagctttctgtatggatcgttttagagctagaaatagcaagttaaaataaggctagtccgttatcaacttgaaaaagtggcaccgagtcggtgcgtggaagcctgatcccatacagaaagcttttt

SEQ ID NO: 295 - RNA, 129 nt, synthetic construct
  source 1..129: mol_type = other RNA
gagaagctttctgtatggatcgttttagagctagaaatagcaagttaaaataaggctagtccgttatcaacttgaaaaagtggcaccgagtcggtgcaagtggaagcctgatcccatacagaaagtttt

SEQ ID NO: 296 - RNA, 130 nt, synthetic construct
  source 1..130: mol_type = other RNA
agaagctttctgtatggatcgttttagagctagaaatagcaagttaaaataaggctagtccgttatcaacttgaaaaagtggcaccgagtcggtgcaagtggaagcctgatcccatacagaaagcttttt

SEQ ID NO: 297 - RNA, 130 nt, synthetic construct
  source 1..130: mol_type = other RNA
agaagctttctgtatggatcgttttagagctagaaatagcaagttaaaataaggctagtccgttatcaacttgaaaaagtggcaccgagtcggtgcaagtggaagcttgatcccatacagaaagcttttt

SEQ ID NO: 298 - RNA, 131 nt, synthetic construct
  source 1..131: mol_type = other RNA
gagaagctttctgtatggatcgttttagagctagaaatagcaagttaaaataaggctagtccgttatcaacttgaaaaagtggcaccgagtcggtgcaagtggaagcctgatcccatacagaaagcttttt

SEQ ID NO: 299 - RNA, 134 nt, synthetic construct
  source 1..134: mol_type = other RNA
agaagctttctgtatggatcgttttagagctagaaatagcaagttaaaataaggctagtccgttatcaacttgaaaaagtggcaccgagtcggtgcttgctgggtttccaaagtggaagcttgatcccatacag

SEQ ID NO: 300 - RNA, 136 nt, synthetic construct
  source 1..136: mol_type = other RNA
agaagctttctgtatggatcgttttagagctagaaatagcaagttaaaataaggctagtccgttatcaacttgaaaaagtggcaccgagtcggtgcttgctgggtttccaaagtggaagcttgatcccatacagaa

SEQ ID NO: 301 - RNA, 136 nt, synthetic construct
  source 1..136: mol_type = other RNA
agaagctttctgtatggatcgttttagagctagaaatagcaagttaaaataaggctagtccgttatcaacttgaaaaagtggcaccgagtcggtgctcttgctgggtttccaaagtggaagcttgatcccatacag

SEQ ID NO: 302 - RNA, 138 nt, synthetic construct
  source 1..138: mol_type = other RNA
agaagctttctgtatggatcgttttagagctagaaatagcaagttaaaataaggctagtccgttatcaacttgaaaaagtggcaccgagtcggtgcttgctgggtttccaaagtggaagcttgatcccatacagaaag

SEQ ID NO: 303 - RNA, 138 nt, synthetic construct
  source 1..138: mol_type = other RNA
agaagctttctgtatggatcgttttagagctagaaatagcaagttaaaataaggctagtccgttatcaacttgaaaaagtggcaccgagtcggtgctcttgctgggtttccaaagtggaagcttgatcccatacagaa

SEQ ID NO: 304 - RNA, 138 nt, synthetic construct
  source 1..138: mol_type = other RNA
agaagctttctgtatggatcgttttagagctagaaatagcaagttaaaataaggctagtccgttatcaacttgaaaaagtggcaccgagtcggtgctgtcttgctgggtttccaaagtggaagcttgatcccatacag

SEQ ID NO: 305 - RNA, 140 nt, synthetic construct
  source 1..140: mol_type = other RNA
agaagctttctgtatggatcgttttagagctagaaatagcaagttaaaataaggctagtccgttatcaacttgaaaaagtggcaccgagtcggtgcttgctgggtttccaaagtggaagcttgatcccatacagaaagct

SEQ ID NO: 306 - RNA, 140 nt, synthetic construct
  source 1..140: mol_type = other RNA
agaagctttctgtatggatcgttttagagctagaaatagcaagttaaaataaggctagtccgttatcaacttgaaaaagtggcaccgagtcggtgctcttgctgggtttccaaagtggaagcttgatcccatacagaaag

SEQ ID NO: 307 - RNA, 140 nt, synthetic construct
  source 1..140: mol_type = other RNA
agaagctttctgtatggatcgttttagagctagaaatagcaagttaaaataaggctagtccgttatcaacttgaaaaagtggcaccgagtcggtgctgtcttgctgggtttccaaagtggaagcttgatcccatacagaa

SEQ ID NO: 308 - RNA, 142 nt, synthetic construct
  source 1..142: mol_type = other RNA
agaagctttctgtatggatcgttttagagctagaaatagcaagttaaaataaggctagtccgttatcaacttgaaaaagtggcaccgagtcggtgctcttgctgggtttccaaagtggaagcttgatcccatacagaaagct

SEQ ID NO: 309 - RNA, 142 nt, synthetic construct
  source 1..142: mol_type = other RNA
agaagctttctgtatggatcgttttagagctagaaatagcaagttaaaataaggctagtccgttatcaacttgaaaaagtggcaccgagtcggtgctgtcttgctgggtttccaaagtggaagcttgatcccatacagaaag

SEQ ID NO: 310 - RNA, 144 nt, synthetic construct
  source 1..144: mol_type = other RNA
agaagctttctgtatggatcgttttagagctagaaatagcaagttaaaataaggctagtccgttatcaacttgaaaaagtggcaccgagtcggtgctgtcttgctgggtttccaaagtggaagcttgatcccatacagaaagct

SEQ ID NO: 311 - RNA, 169 nt, synthetic construct
  source 1..169: mol_type = other RNA
gagaagctttctgtatggatcgttttagagctagaaatagcaagttaaaataaggctagtccgttatcaacttgaaaaagtggcaccgagtcggtgcttgctgggtttccaaagtggaagcttgatcccatacagaacattgacgcgtctctacgtgggggcgcgtttt

SEQ ID NO: 312 - RNA, 171 nt, synthetic construct
  source 1..171: mol_type = other RNA
gagaagctttctgtatggatcgttttagagctagaaatagcaagttaaaataaggctagtccgttatcaacttgaaaaagtggcaccgagtcggtgcttgctgggtttccaaagtggaagcttgatcccatacagaaaacattgacgcgtctctacgtgggggcgcgtttt

SEQ ID NO: 313 - RNA, 171 nt, synthetic construct
  source 1..171: mol_type = other RNA
gagaagctttctgtatggatcgttttagagctagaaatagcaagttaaaataaggctagtccgttatcaacttgaaaaagtggcaccgagtcggtgctcttgctgggtttccaaagtggaagcttgatcccatacagaacattgacgcgtctctacgtgggggcgcgtttt

SEQ ID NO: 314 - RNA, 173 nt, synthetic construct
  source 1..173: mol_type = other RNA
gagaagctttctgtatggatcgttttagagctagaaatagcaagttaaaataaggctagtccgttatcaacttgaaaaagtggcaccgagtcggtgcttgctgggtttccaaagtggaagcttgatcccatacagaaagaacattgacgcgtctctacgtgggggcgcgtttt

SEQ ID NO: 315 - RNA, 173 nt, synthetic construct
  source 1..173: mol_type = other RNA
gagaagctttctgtatggatcgttttagagctagaaatagcaagttaaaataaggctagtccgttatcaacttgaaaaagtggcaccgagtcggtgctcttgctgggtttccaaagtggaagcttgatcccatacagaaaacattgacgcgtctctacgtgggggcgcgtttt

SEQ ID NO: 316 - RNA, 173 nt, synthetic construct
  source 1..173: mol_type = other RNA
gagaagctttctgtatggatcgttttagagctagaaatagcaagttaaaataaggctagtccgttatcaacttgaaaaagtggcaccgagtcggtgctgtcttgctgggtttccaaagtggaagcttgatcccatacagaacattgacgcgtctctacgtgggggcgcgtttt

SEQ ID NO: 317 - RNA, 175 nt, synthetic construct
  source 1..175: mol_type = other RNA
gagaagctttctgtatggatcgttttagagctagaaatagcaagttaaaataaggctagtccgttatcaacttgaaaaagtggcaccgagtcggtgcttgctgggtttccaaagtggaagcttgatcccatacagaaagctaacattgacgcgtctctacgtgggggcgcgtttt

SEQ ID NO: 318 - RNA, 175 nt, synthetic construct
  source 1..175: mol_type = other RNA
gagaagctttctgtatggatcgttttagagctagaaatagcaagttaaaataaggctagtccgttatcaacttgaaaaagtggcaccgagtcggtgctcttgctgggtttccaaagtggaagcttgatcccatacagaaagaacattgacgcgtctctacgtgggggcgcgtttt

SEQ ID NO: 319 - RNA, 175 nt, synthetic construct
  source 1..175: mol_type = other RNA
gagaagctttctgtatggatcgttttagagctagaaatagcaagttaaaataaggctagtccgttatcaacttgaaaaagtggcaccgagtcggtgctgtcttgctgggtttccaaagtggaagcttgatcccatacagaaaacattgacgcgtctctacgtgggggcgcgtttt

SEQ ID NO: 320 - RNA, 177 nt, synthetic construct
  source 1..177: mol_type = other RNA
gagaagctttctgtatggatcgttttagagctagaaatagcaagttaaaataaggctagtccgttatcaacttgaaaaagtggcaccgagtcggtgctcttgctgggtttccaaagtggaagcttgatcccatacagaaagctaacattgacgcgtctctacgtgggggcgcgtttt

SEQ ID NO: 321 - RNA, 177 nt, synthetic construct
  source 1..177: mol_type = other RNA
gagaagctttctgtatggatcgttttagagctagaaatagcaagttaaaataaggctagtccgttatcaacttgaaaaagtggcaccgagtcggtgctgtcttgctgggtttccaaagtggaagcttgatcccatacagaaagaacattgacgcgtctctacgtgggggcgcgtttt

SEQ ID NO: 322 - RNA, 179 nt, synthetic construct
  source 1..179: mol_type = other RNA
gagaagctttctgtatggatcgttttagagctagaaatagcaagttaaaataaggctagtccgttatcaacttgaaaaagtggcaccgagtcggtgctgtcttgctgggtttccaaagtggaagcttgatcccatacagaaagctaacattgacgcgtctctacgtgggggcgcgtttt

SEQ ID NO: 323 - RNA, 96 nt, synthetic construct
  source 1..96: mol_type = other RNA
gtcttgctgggtttccaaaggttttagagctagaaatagcaagttaaaataaggctagtccgttatcaacttgaaaaagtggcaccgagtcggtgc

SEQ ID NO: 324 - RNA, 96 nt, synthetic construct
  source 1..96: mol_type = other RNA
gtgaagacaggtgtcttgctgttttagagctagaaatagcaagttaaaataaggctagtccgttatcaacttgaaaaagtggcaccgagtcggtgc

SEQ ID NO: 325 - RNA, 96 nt, synthetic construct
  source 1..96: mol_type = other RNA
cgtgaagacaggtgtcttgcgttttagagctagaaatagcaagttaaaataaggctagtccgttatcaacttgaaaaagtggcaccgagtcggtgc

SEQ ID NO: 326 - RNA, 96 nt, synthetic construct
  source 1..96: mol_type = other RNA
gaactgagccacgtgaagacgttttagagctagaaatagcaagttaaaataaggctagtccgttatcaacttgaaaaagtggcaccgagtcggtgc

SEQ ID NO: 327 - RNA, 96 nt, synthetic construct
  source 1..96: mol_type = other RNA
acatcttccttaggaactccgttttagagctagaaatagcaagttaaaataaggctagtccgttatcaacttgaaaaagtggcaccgagtcggtgc

SEQ ID NO: 328 - RNA, 96 nt, synthetic construct
  source 1..96: mol_type = other RNA
aggcttcatacatcttccttgttttagagctagaaatagcaagttaaaataaggctagtccgttatcaacttgaaaaagtggcaccgagtcggtgc

SEQ ID NO: 329 - RNA, 96 nt, synthetic construct
  source 1..96: mol_type = other RNA
actacttaccatctctttcagttttagagctagaaatagcaagttaaaataaggctagtccgttatcaacttgaaaaagtggcaccgagtcggtgc

SEQ ID NO: 330 - RNA, 100 nt, synthetic construct
  source 1..100: mol_type = other RNA
gtcttgctgggtttccaaaggttttagagctagaaatagcaagttaaaataaggctagtccgttatcaacttgaaaaagtggcaccgagtcggtgctttt

SEQ ID NO: 331 - RNA, 100 nt, synthetic construct
  source 1..100: mol_type = other RNA
gtgaagacaggtgtcttgctgttttagagctagaaatagcaagttaaaataaggctagtccgttatcaacttgaaaaagtggcaccgagtcggtgctttt

SEQ ID NO: 332 - RNA, 100 nt, synthetic construct
  source 1..100: mol_type = other RNA
gaactgagccacgtgaagacgttttagagctagaaatagcaagttaaaataaggctagtccgttatcaacttgaaaaagtggcaccgagtcggtgctttt

SEQ ID NO: 333 - RNA, 101 nt, synthetic construct
  source 1..101: mol_type = other RNA
gcgtgaagacaggtgtcttgcgttttagagctagaaatagcaagttaaaataaggctagtccgttatcaacttgaaaaagtggcaccgagtcggtgctttt

SEQ ID NO: 334 - RNA, 101 nt, synthetic construct
  source 1..101: mol_type = other RNA
gacatcttccttaggaactccgttttagagctagaaatagcaagttaaaataaggctagtccgttatcaacttgaaaaagtggcaccgagtcggtgctttt

SEQ ID NO: 335 - RNA, 101 nt, synthetic construct
  source 1..101: mol_type = other RNA
gaggcttcatacatcttccttgttttagagctagaaatagcaagttaaaataaggctagtccgttatcaacttgaaaaagtggcaccgagtcggtgctttt

SEQ ID NO: 336 - RNA, 101 nt, synthetic construct
  source 1..101: mol_type = other RNA
gactacttaccatctctttcagttttagagctagaaatagcaagttaaaataaggctagtccgttatcaacttgaaaaagtggcaccgagtcggtgctttt

SEQ ID NO: 337 - RNA, 130 nt, synthetic construct
  source 1..130: mol_type = other RNA
gtcttgctgggtttccaaaggttttagagctagaaatagcaagttaaaataaggctagtccgttatcaacttgaaaaagtggcaccgagtcggtgcaacattgacgcgtctctacgtgggggcgcgtttt

SEQ ID NO: 338 - RNA, 130 nt, synthetic construct
  source 1..130: mol_type = other RNA
gtgaagacaggtgtcttgctgttttagagctagaaatagcaagttaaaataaggctagtccgttatcaacttgaaaaagtggcaccgagtcggtgcaacattgacgcgtctctacgtgggggcgcgtttt

SEQ ID NO: 339 - RNA, 130 nt, synthetic construct
  source 1..130: mol_type = other RNA
gaactgagccacgtgaagacgttttagagctagaaatagcaagttaaaataaggctagtccgttatcaacttgaaaaagtggcaccgagtcggtgcaacattgacgcgtctctacgtgggggcgcgtttt

SEQ ID NO: 340 - RNA, 131 nt, synthetic construct
  source 1..131: mol_type = other RNA
gcgtgaagacaggtgtcttgcgttttagagctagaaatagcaagttaaaataaggctagtccgttatcaacttgaaaaagtggcaccgagtcggtgcaacattgacgcgtctctacgtgggggcgcgtttt

SEQ ID NO: 341 - RNA, 131 nt, synthetic construct
  source 1..131: mol_type = other RNA
gacatcttccttaggaactccgttttagagctagaaatagcaagttaaaataaggctagtccgttatcaacttgaaaaagtggcaccgagtcggtgcaacattgacgcgtctctacgtgggggcgcgtttt

SEQ ID NO: 342 - RNA, 131 nt, synthetic construct
  source 1..131: mol_type = other RNA
gaggcttcatacatcttccttgttttagagctagaaatagcaagttaaaataaggctagtccgttatcaacttgaaaaagtggcaccgagtcggtgcaacattgacgcgtctctacgtgggggcgcgtttt

SEQ ID NO: 343 - RNA, 131 nt, synthetic construct
  source 1..131: mol_type = other RNA
gactacttaccatctctttcagttttagagctagaaatagcaagttaaaataaggctagtccgttatcaacttgaaaaagtggcaccgagtcggtgcaacattgacgcgtctctacgtgggggcgcgtttt

SEQ ID NO: 344 - RNA, 17 nt, synthetic construct
  source 1..17: mol_type = other RNA
tctttcttgtgattatc

SEQ ID NO: 345 - RNA, 18 nt, synthetic construct
  source 1..18: mol_type = other RNA
atctttcttgtgattatc

SEQ ID NO: 346 - RNA, 19 nt, synthetic construct
  source 1..19: mol_type = other RNA
gatctttcttgtgattatc

SEQ ID NO: 347 - RNA, 21 nt, synthetic construct
  source 1..21: mol_type = other RNA
tagatctttcttgtgattatc

SEQ ID NO: 348 - RNA, 22 nt, synthetic construct
  source 1..22: mol_type = other RNA
gtagatctttcttgtgattatc

SEQ ID NO: 349-353 - skipped (5 entries)

SEQ ID NO: 354 - RNA, 10 nt, synthetic construct
  source 1..10: mol_type = other RNA
aatcacaaga

SEQ ID NO: 355 - RNA, 11 nt, synthetic construct
  source 1..11: mol_type = other RNA
aatcacaagaa

SEQ ID NO: 356 - RNA, 12 nt, synthetic construct
  source 1..12: mol_type = other RNA
aatcacaagaaa

SEQ ID NO: 357 - RNA, 13 nt, synthetic construct
  source 1..13: mol_type = other RNA
aatcacaagaaag

SEQ ID NO: 358 - RNA, 14 nt, synthetic construct
  source 1..14: mol_type = other RNA
aatcacaagaaaga

SEQ ID NO: 359 - RNA, 15 nt, synthetic construct
  source 1..15: mol_type = other RNA
aatcacaagaaagat

SEQ ID NO: 360 - RNA, 16 nt, synthetic construct
  source 1..16: mol_type = other RNA
aatcacaagaaagatc

SEQ ID NO: 361 - RNA, 17 nt, synthetic construct
  source 1..17: mol_type = other RNA
aatcacaagaaagatct

SEQ ID NO: 362 - RNA, 18 nt, synthetic construct
  source 1..18: mol_type = other RNA
aatcacaagaaagatcta

SEQ ID NO: 363 - RNA, 19 nt, synthetic construct
  source 1..19: mol_type = other RNA
aatcacaagaaagatctac

SEQ ID NO: 364 - RNA, 33 nt, synthetic construct
  source 1..33: mol_type = other RNA
cccatacagaaagcttctgcatccaaaactgat

SEQ ID NO: 365 - RNA, 33 nt, synthetic construct
  source 1..33: mol_type = other RNA
cccatacagaaagcttctgcatccaaaattgat

SEQ ID NO: 366 - RNA, 34 nt, synthetic construct
  source 1..34: mol_type = other RNA
tcccatacagaaagcttctgcatccaaaactgat

SEQ ID NO: 367 - RNA, 34 nt, synthetic construct
  source 1..34: mol_type = other RNA
tcccatacagaaagcttctgcatccaaaattgat

SEQ ID NO: 368 - RNA, 35 nt, synthetic construct
  source 1..35: mol_type = other RNA
atcccatacagaaagcttctgcatccaaaactgat

SEQ ID NO: 369 - RNA, 35 nt, synthetic construct
  source 1..35: mol_type = other RNA
atcccatacagaaagcttctgcatccaaaattgat

SEQ ID NO: 370 - RNA, 36 nt, synthetic construct
  source 1..36: mol_type = other RNA
gatcccatacagaaagcttctgcatccaaaactgat

SEQ ID NO: 371 - RNA, 36 nt, synthetic construct
  source 1..36: mol_type = other RNA
gatcccatacagaaagcttctgcatccaaaattgat

SEQ ID NO: 372 - RNA, 37 nt, synthetic construct
  source 1..37: mol_type = other RNA
tgatcccatacagaaagcttctgcatccaaaactgat

SEQ ID NO: 373 - RNA, 37 nt, synthetic construct
  source 1..37: mol_type = other RNA
tgatcccatacagaaagcttctgcatccaaaattgat

SEQ ID NO: 374 - RNA, 38 nt, synthetic construct
  source 1..38: mol_type = other RNA
ctgatcccatacagaaagcttctgcatccaaaactgat

SEQ ID NO: 375 - RNA, 38 nt, synthetic construct
  source 1..38: mol_type = other RNA
ctgatcccatacagaaagcttctgcatccaaaattgat

SEQ ID NO: 376 - RNA, 39 nt, synthetic construct
  source 1..39: mol_type = other RNA
cctgatcccatacagaaagcttctgcatccaaaactgat

SEQ ID NO: 377 - RNA, 39 nt, synthetic construct
  source 1..39: mol_type = other RNA
cctgatcccatacagaaagcttctgcatccaaaattgat

SEQ ID NO: 378 - RNA, 40 nt, synthetic construct
  source 1..40: mol_type = other RNA
gcctgatcccatacagaaagcttctgcatccaaaactgat

SEQ ID NO: 379 - RNA, 40 nt, synthetic construct
  source 1..40: mol_type = other RNA
gcctgatcccatacagaaagcttctgcatccaaaattgat

SEQ ID NO: 380 - RNA, 20 nt, synthetic construct
  source 1..20: mol_type = other RNA
aaagcttctgcatccaaaac

SEQ ID NO: 381 - RNA, 20 nt, synthetic construct
  source 1..20: mol_type = other RNA
aaagcttctgcatccaaaat

SEQ ID NO: 382 - RNA, 20 nt, synthetic construct
  source 1..20: mol_type = other RNA
aagcctgatcccatacagaa

SEQ ID NO: 383 - RNA, 20 nt, synthetic construct
  source 1..20: mol_type = other RNA
gatcccatacagaaagcttc

SEQ ID NO: 384 - RNA, 20 nt, synthetic construct
  source 1..20: mol_type = other RNA
gtggaagcctgatcccatac

SEQ ID NO: 385 - RNA, 17 nt, synthetic construct
  source 1..17: mol_type = other RNA
agatctttcttgtgatt

SEQ ID NO: 386 - RNA, 18 nt, synthetic construct
  source 1..18: mol_type = other RNA
tagatctttcttgtgatt

SEQ ID NO: 387 - RNA, 19 nt, synthetic construct
  source 1..19: mol_type = other RNA
gtagatctttcttgtgatt

SEQ ID NO: 388 - RNA, 21 nt, synthetic construct
  source 1..21: mol_type = other RNA
cagtagatctttcttgtgatt

SEQ ID NO: 389 - RNA, 22 nt, synthetic construct
  source 1..22: mol_type = other RNA
tcagtagatctttcttgtgatt

SEQ ID NO: 390-394 - skipped (5 entries)

SEQ ID NO: 395 - RNA, 10 nt, synthetic construct
  source 1..10: mol_type = other RNA
cacaagaaag

SEQ ID NO: 396 - RNA, 11 nt, synthetic construct
  source 1..11: mol_type = other RNA
cacaagaaaga

SEQ ID NO: 397 - RNA, 12 nt, synthetic construct
  source 1..12: mol_type = other RNA
cacaagaaagat

SEQ ID NO: 398 - RNA, 13 nt, synthetic construct
  source 1..13: mol_type = other RNA
cacaagaaagatc

SEQ ID NO: 399 - RNA, 14 nt, synthetic construct
  source 1..14: mol_type = other RNA
cacaagaaagatct

SEQ ID NO: 400 - RNA, 15 nt, synthetic construct
  source 1..15: mol_type = other RNA
cacaagaaagatcta

SEQ ID NO: 401 - RNA, 16 nt, synthetic construct
  source 1..16: mol_type = other RNA
cacaagaaagatctac

SEQ ID NO: 402 - RNA, 17 nt, synthetic construct
  source 1..17: mol_type = other RNA
cacaagaaagatctact

SEQ ID NO: 403 - RNA, 18 nt, synthetic construct
  source 1..18: mol_type = other RNA
cacaagaaagatctactg

SEQ ID NO: 404 - RNA, 19 nt, synthetic construct
  source 1..19: mol_type = other RNA
cacaagaaagatctactga

SEQ ID NO: 405 - RNA, 36 nt, synthetic construct
  source 1..36: mol_type = other RNA
cccatacagaaagcttctgcatccaaaactgataat

SEQ ID NO: 406 - RNA, 37 nt, synthetic construct
  source 1..37: mol_type = other RNA
tcccatacagaaagcttctgcatccaaaactgataat

SEQ ID NO: 407 - RNA, 38 nt, synthetic construct
  source 1..38: mol_type = other RNA
atcccatacagaaagcttctgcatccaaaactgataat

SEQ ID NO: 408 - RNA, 39 nt, synthetic construct
  source 1..39: mol_type = other RNA
gatcccatacagaaagcttctgcatccaaaactgataat

SEQ ID NO: 409 - RNA, 40 nt, synthetic construct
  source 1..40: mol_type = other RNA
tgatcccatacagaaagcttctgcatccaaaactgataat

SEQ ID NO: 410 - RNA, 20 nt, synthetic construct
  source 1..20: mol_type = other RNA
aagcttctgcatccaaaact

SEQ ID NO: 411 - RNA, 20 nt, synthetic construct
  source 1..20: mol_type = other RNA
agaaagcttctgcatccaaa

SEQ ID NO: 412 - RNA, 20 nt, synthetic construct
  source 1..20: mol_type = other RNA
caggtgtcttgctgggtttc

SEQ ID NO: 413 - RNA, 20 nt, synthetic construct
  source 1..20: mol_type = other RNA
ctgggtttccaaagtggaag

SEQ ID NO: 414 - RNA, 20 nt, synthetic construct
  source 1..20: mol_type = other RNA
tggaactgagccacgtgaag

SEQ ID NO: 415 - RNA, 17 nt, synthetic construct
  source 1..17: mol_type = other RNA
atcagttttggatgcag

SEQ ID NO: 416 - RNA, 18 nt, synthetic construct
  source 1..18: mol_type = other RNA
tatcagttttggatgcag

SEQ ID NO: 417 - RNA, 19 nt, synthetic construct
  source 1..19: mol_type = other RNA
ttatcagttttggatgcag

SEQ ID NO: 418 - RNA, 20 nt, synthetic construct
  source 1..20: mol_type = other RNA
attatcagttttggatgcag

SEQ ID NO: 419 - RNA, 21 nt, synthetic construct
  source 1..21: mol_type = other RNA
gattatcagttttggatgcag

SEQ ID NO: 420 - RNA, 22 nt, synthetic construct
  source 1..22: mol_type = other RNA
tgattatcagttttggatgcag

SEQ ID NO: 421-425 - skipped (5 entries)

SEQ ID NO: 426 - RNA, 10 nt, synthetic construct
  source 1..10: mol_type = other RNA
catccaaaac

SEQ ID NO: 427 - RNA, 11 nt, synthetic construct
  source 1..11: mol_type = other RNA
catccaaaact

SEQ ID NO: 428 - RNA, 12 nt, synthetic construct
  source 1..12: mol_type = other RNA
catccaaaactg

SEQ ID NO: 429 - RNA, 13 nt, synthetic construct
  source 1..13: mol_type = other RNA
catccaaaactga

SEQ ID NO: 430 - RNA, 14 nt, synthetic construct
  source 1..14: mol_type = other RNA
catccaaaactgat

SEQ ID NO: 431 - RNA, 15 nt, synthetic construct
  source 1..15: mol_type = other RNA
catccaaaactgata

SEQ ID NO: 432 - RNA, 16 nt, synthetic construct
  source 1..16: mol_type = other RNA
catccaaaactgataa

SEQ ID NO: 433 - RNA, 17 nt, synthetic construct
  source 1..17: mol_type = other RNA
catccaaaactgataat

SEQ ID NO: 434 - RNA, 18 nt, synthetic construct
  source 1..18: mol_type = other RNA
catccaaaactgataatc

SEQ ID NO: 435 - RNA, 19 nt, synthetic construct
  source 1..19: mol_type = other RNA
catccaaaactgataatca

SEQ ID NO: 436 - RNA, 19 nt, synthetic construct
  source 1..19: mol_type = other RNA
cccatacagaaagcttctg

SEQ ID NO: 437 - RNA, 19 nt, synthetic construct
  source 1..19: mol_type = other RNA
cccatacagaaagtttctg

SEQ ID NO: 438 - RNA, 20 nt, synthetic construct
  source 1..20: mol_type = other RNA
tcccatacagaaagcttctg

SEQ ID NO: 439 - RNA, 20 nt, synthetic construct
  source 1..20: mol_type = other RNA
tcccatacagaaagtttctg

SEQ ID NO: 440 - RNA, 21 nt, synthetic construct
  source 1..21: mol_type = other RNA
atcccatacagaaagcttctg

SEQ ID NO: 441 - RNA, 21 nt, synthetic construct
  source 1..21: mol_type = other RNA
atcccatacagaaagtttctg

SEQ ID NO: 442 - RNA, 22 nt, synthetic construct
  source 1..22: mol_type = other RNA
gatcccatacagaaagcttctg

SEQ ID NO: 443 - RNA, 22 nt, synthetic construct
  source 1..22: mol_type = other RNA
gatcccatacagaaagtttctg

SEQ ID NO: 444 - RNA, 23 nt, synthetic construct
  source 1..23: mol_type = other RNA
tgatcccatacagaaagcttctg

SEQ ID NO: 445 - RNA, 23 nt, synthetic construct
  source 1..23: mol_type = other RNA
tgatcccatacagaaagtttctg

SEQ ID NO: 446 - RNA, 24 nt, synthetic construct
  source 1..24: mol_type = other RNA
ctgatcccatacagaaagcttctg

SEQ ID NO: 447 - RNA, 24 nt, synthetic construct
  source 1..24: mol_type = other RNA
ctgatcccatacagaaagtttctg

SEQ ID NO: 448 - RNA, 25 nt, synthetic construct
  source 1..25: mol_type = other RNA
cctgatcccatacagaaagcttctg

SEQ ID NO: 449 - RNA, 25 nt, synthetic construct
  source 1..25: mol_type = other RNA
cctgatcccatacagaaagtttctg

SEQ ID NO: 450 - RNA, 26 nt, synthetic construct
  source 1..26: mol_type = other RNA
gcctgatcccatacagaaagcttctg

SEQ ID NO: 451 - RNA, 26 nt, synthetic construct
  source 1..26: mol_type = other RNA
gcctgatcccatacagaaagtttctg

SEQ ID NO: 452 - RNA, 27 nt, synthetic construct
  source 1..27: mol_type = other RNA
agcctgatcccatacagaaagcttctg

SEQ ID NO: 453 - RNA, 27 nt, synthetic construct
  source 1..27: mol_type = other RNA
agcctgatcccatacagaaagtttctg

SEQ ID NO: 454 - RNA, 28 nt, synthetic construct
  source 1..28: mol_type = other RNA
aagcctgatcccatacagaaagcttctg

SEQ ID NO: 455 - RNA, 28 nt, synthetic construct
  source 1..28: mol_type = other RNA
aagcctgatcccatacagaaagtttctg

SEQ ID NO: 456 - RNA, 29 nt, synthetic construct
  source 1..29: mol_type = other RNA
gaagcctgatcccatacagaaagcttctg

SEQ ID NO: 457 - RNA, 29 nt, synthetic construct
  source 1..29: mol_type = other RNA
gaagcctgatcccatacagaaagtttctg

SEQ ID NO: 458 - RNA, 30 nt, synthetic construct
  source 1..30: mol_type = other RNA
ggaagcctgatcccatacagaaagcttctg

SEQ ID NO: 459 - RNA, 30 nt, synthetic construct
  source 1..30: mol_type = other RNA
ggaagcctgatcccatacagaaagtttctg

SEQ ID NO: 460 - RNA, 31 nt, synthetic construct
  source 1..31: mol_type = other RNA
tggaagcctgatcccatacagaaagcttctg

SEQ ID NO: 461 - RNA, 31 nt, synthetic construct
  source 1..31: mol_type = other RNA
tggaagcctgatcccatacagaaagtttctg

SEQ ID NO: 462 - RNA, 32 nt, synthetic construct
  source 1..32: mol_type = other RNA
gtggaagcctgatcccatacagaaagcttctg

SEQ ID NO: 463 - RNA, 32 nt, synthetic construct
  source 1..32: mol_type = other RNA
gtggaagcctgatcccatacagaaagtttctg

SEQ ID NO: 464 - RNA, 33 nt, synthetic construct
  source 1..33: mol_type = other RNA
agtggaagcctgatcccatacagaaagcttctg

SEQ ID NO: 465 - RNA, 33 nt, synthetic construct
  source 1..33: mol_type = other RNA
agtggaagcctgatcccatacagaaagtttctg

SEQ ID NO: 466 - RNA, 34 nt, synthetic construct
  source 1..34: mol_type = other RNA
aagtggaagcctgatcccatacagaaagcttctg

SEQ ID NO: 467 - RNA, 34 nt, synthetic construct
  source 1..34: mol_type = other RNA
aagtggaagcctgatcccatacagaaagtttctg

SEQ ID NO: 468 - RNA, 35 nt, synthetic construct
  source 1..35: mol_type = other RNA
aaagtggaagcctgatcccatacagaaagcttctg

SEQ ID NO: 469 - RNA, 35 nt, synthetic construct
  source 1..35: mol_type = other RNA
aaagtggaagcctgatcccatacagaaagtttctg

SEQ ID NO: 470 - RNA, 36 nt, synthetic construct
  source 1..36: mol_type = other RNA
caaagtggaagcctgatcccatacagaaagcttctg

SEQ ID NO: 471 - RNA, 36 nt, synthetic construct
  source 1..36: mol_type = other RNA
caaagtggaagcctgatcccatacagaaagtttctg

SEQ ID NO: 472 - RNA, 37 nt, synthetic construct
  source 1..37: mol_type = other RNA
ccaaagtggaagcctgatcccatacagaaagcttctg

SEQ ID NO: 473 - RNA, 37 nt, synthetic construct
  source 1..37: mol_type = other RNA
ccaaagtggaagcctgatcccatacagaaagtttctg

SEQ ID NO: 474 - RNA, 38 nt, synthetic construct
  source 1..38: mol_type = other RNA
tccaaagtggaagcctgatcccatacagaaagcttctg

SEQ ID NO: 475 - RNA, 38 nt, synthetic construct
  source 1..38: mol_type = other RNA
tccaaagtggaagcctgatcccatacagaaagtttctg

SEQ ID NO: 476 - RNA, 39 nt, synthetic construct
  source 1..39: mol_type = other RNA
ttccaaagtggaagcctgatcccatacagaaagcttctg

SEQ ID NO: 477 - RNA, 39 nt, synthetic construct
  source 1..39: mol_type = other RNA
ttccaaagtggaagcctgatcccatacagaaagtttctg

SEQ ID NO: 478 - RNA, 40 nt, synthetic construct
  source 1..40: mol_type = other RNA
tttccaaagtggaagcctgatcccatacagaaagcttctg

SEQ ID NO: 479 - RNA, 40 nt, synthetic construct
  source 1..40: mol_type = other RNA
tttccaaagtggaagcctgatcccatacagaaagtttctg

SEQ ID NO: 480 - RNA, 20 nt, synthetic construct
  source 1..20: mol_type = other RNA
aaggcttcatacatcttcct

SEQ ID NO: 481 - RNA, 20 nt, synthetic construct
  source 1..20: mol_type = other RNA
agtggaagcctgatcccata

SEQ ID NO: 482 - RNA, 20 nt, synthetic construct
  source 1..20: mol_type = other RNA
cactacttaccatctctttc

SEQ ID NO: 483 - RNA, 20 nt, synthetic construct
  source 1..20: mol_type = other RNA
ccttaggaactcctggaact

SEQ ID NO: 484 - RNA, 20 nt, synthetic construct
  source 1..20: mol_type = other RNA
gaagcctgatcccatacaga

SEQ ID NO: 485 - RNA, 20 nt, synthetic construct
  source 1..20: mol_type = other RNA
ggaactgagccacgtgaaga

SEQ ID NO: 486 - RNA, 20 nt, synthetic construct
  source 1..20: mol_type = other RNA
ggtgtcttgctgggtttcca

SEQ ID NO: 487 - RNA, 20 nt, synthetic construct
  source 1..20: mol_type = other RNA
tcctggaactgagccacgtg

SEQ ID NO: 488 - RNA, 20 nt, synthetic construct
  source 1..20: mol_type = other RNA
ttgctgggtttccaaagtgg

SEQ ID NO: 489 - RNA, 17 nt, synthetic construct
  source 1..17: mol_type = other RNA
aagctttctgtatggat

SEQ ID NO: 490 - RNA, 18 nt, synthetic construct
  source 1..18: mol_type = other RNA
gaagctttctgtatggat

SEQ ID NO: 491 - RNA, 19 nt, synthetic construct
  source 1..19: mol_type = other RNA
agaagctttctgtatggat

SEQ ID NO: 492 - RNA, 20 nt, synthetic construct
  source 1..20: mol_type = other RNA
cagaagctttctgtatggat

SEQ ID NO: 493 - RNA, 21 nt, synthetic construct
  source 1..21: mol_type = other RNA
gcagaagctttctgtatggat

SEQ ID NO: 494 - RNA, 22 nt, synthetic construct
  source 1..22: mol_type = other RNA
tgcagaagctttctgtatggat

SEQ ID NO: 495-499 - skipped (5 entries)

SEQ ID NO: 500 - RNA, 10 nt, synthetic construct
  source 1..10: mol_type = other RNA
catacagaaa

SEQ ID NO: 501 - RNA, 11 nt, synthetic construct
  source 1..11: mol_type = other RNA
catacagaaag

SEQ ID NO: 502 - RNA, 12 nt, synthetic construct
  source 1..12: mol_type = other RNA
catacagaaagc

SEQ ID NO: 503 - RNA, 13 nt, synthetic construct
  source 1..13: mol_type = other RNA
catacagaaagct

SEQ ID NO: 504 - RNA, 14 nt, synthetic construct
  source 1..14: mol_type = other RNA
catacagaaagctt

SEQ ID NO: 505 - RNA, 15 nt, synthetic construct
  source 1..15: mol_type = other RNA
catacagaaagcttc

SEQ ID NO: 506 - RNA, 16 nt, synthetic construct
  source 1..16: mol_type = other RNA
catacagaaagcttct

SEQ ID NO: 507 - RNA, 17 nt, synthetic construct
  source 1..17: mol_type = other RNA
catacagaaagcttctg

SEQ ID NO: 508 - RNA, 18 nt, synthetic construct
  source 1..18: mol_type = other RNA
catacagaaagcttctgc

SEQ ID NO: 509 - RNA, 19 nt, synthetic construct
  source 1..19: mol_type = other RNA
catacagaaagcttctgca

SEQ ID NO: 510 - RNA, 10 nt, synthetic construct
  source 1..10: mol_type = other RNA
agcctgatcc

SEQ ID NO: 511 - RNA, 11 nt, synthetic construct
  source 1..11: mol_type = other RNA
aagcctgatcc

SEQ ID NO: 512 - RNA, 12 nt, synthetic construct
  source 1..12: mol_type = other RNA
gaagcctgatcc

SEQ ID NO: 513 - RNA, 13 nt, synthetic construct
  source 1..13: mol_type = other RNA
ggaagcctgatcc

SEQ ID NO: 514 - RNA, 14 nt, synthetic construct
  source 1..14: mol_type = other RNA
tggaagcctgatcc

SEQ ID NO: 515 - RNA, 15 nt, synthetic construct
  source 1..15: mol_type = other RNA
gtggaagcctgatcc

SEQ ID NO: 516 - RNA, 16 nt, synthetic construct
  source 1..16: mol_type = other RNA
agtggaagcctgatcc

SEQ ID NO: 517 - RNA, 17 nt, synthetic construct
  source 1..17: mol_type = other RNA
aagtggaagcctgatcc

SEQ ID NO: 518 - RNA, 18 nt, synthetic construct
  source 1..18: mol_type = other RNA
aaagtggaagcctgatcc

SEQ ID NO: 519 - RNA, 19 nt, synthetic construct
  source 1..19: mol_type = other RNA
caaagtggaagcctgatcc

SEQ ID NO: 520 - RNA, 20 nt, synthetic construct
  source 1..20: mol_type = other RNA
ccaaagtggaagcctgatcc

SEQ ID NO: 521 - RNA, 21 nt, synthetic construct
  source 1..21: mol_type = other RNA
tccaaagtggaagcctgatcc

SEQ ID NO: 522 - RNA, 22 nt, synthetic construct
  source 1..22: mol_type = other RNA
ttccaaagtggaagcctgatcc

SEQ ID NO: 523 - RNA, 23 nt, synthetic construct
  source 1..23: mol_type = other RNA
tttccaaagtggaagcctgatcc

SEQ ID NO: 524 - RNA, 24 nt, synthetic construct
  source 1..24: mol_type = other RNA
gtttccaaagtggaagcctgatcc

SEQ ID NO: 525 - RNA, 25 nt, synthetic construct
  source 1..25: mol_type = other RNA
ggtttccaaagtggaagcctgatcc

SEQ ID NO: 526 - RNA, 26 nt, synthetic construct
  source 1..26: mol_type = other RNA
gggtttccaaagtggaagcctgatcc

SEQ ID NO: 527 - RNA, 27 nt, synthetic construct
  source 1..27: mol_type = other RNA
tgggtttccaaagtggaagcctgatcc

SEQ ID NO: 528 - RNA, 28 nt, synthetic construct
  source 1..28: mol_type = other RNA
ctgggtttccaaagtggaagcctgatcc

SEQ ID NO: 529 - RNA, 29 nt, synthetic construct
  source 1..29: mol_type = other RNA
gctgggtttccaaagtggaagcctgatcc

SEQ ID NO: 530 - RNA, 30 nt, synthetic construct
  source 1..30: mol_type = other RNA
tgctgggtttccaaagtggaagcctgatcc

SEQ ID NO: 531 - RNA, 31 nt, synthetic construct
  source 1..31: mol_type = other RNA
ttgctgggtttccaaagtggaagcctgatcc

SEQ ID NO: 532 - RNA, 32 nt, synthetic construct
  source 1..32: mol_type = other RNA
cttgctgggtttccaaagtggaagcctgatcc

SEQ ID NO: 533 - RNA, 33 nt, synthetic construct
  source 1..33: mol_type = other RNA
tcttgctgggtttccaaagtggaagcctgatcc

SEQ ID NO: 534 - RNA, 34 nt, synthetic construct
  source 1..34: mol_type = other RNA
gtcttgctgggtttccaaagtggaagcctgatcc

SEQ ID NO: 535 - RNA, 35 nt, synthetic construct
  source 1..35: mol_type = other RNA
tgtcttgctgggtttccaaagtggaagcctgatcc

SEQ ID NO: 536 - RNA, 36 nt, synthetic construct
  source 1..36: mol_type = other RNA
gtgtcttgctgggtttccaaagtggaagcctgatcc

SEQ ID NO: 537 - RNA, 37 nt, synthetic construct
  source 1..37: mol_type = other RNA
ggtgtcttgctgggtttccaaagtggaagcctgatcc

SEQ ID NO: 538 - RNA, 38 nt, synthetic construct
  source 1..38: mol_type = other RNA
aggtgtcttgctgggtttccaaagtggaagcctgatcc

SEQ ID NO: 539 - RNA, 39 nt, synthetic construct
  source 1..39: mol_type = other RNA
caggtgtcttgctgggtttccaaagtggaagcctgatcc

SEQ ID NO: 540 - RNA, 40 nt, synthetic construct
  source 1..40: mol_type = other RNA
acaggtgtcttgctgggtttccaaagtggaagcctgatcc

SEQ ID NO: 541 - RNA, 20 nt, synthetic construct
  source 1..20: mol_type = other RNA
cagaaaataatttcattatt

SEQ ID NO: 542 - RNA, 20 nt, synthetic construct
  source 1..20: mol_type = other RNA
tacatcttccttaggaactc

SEQ ID NO: 543 - RNA, 20 nt, synthetic construct
  source 1..20: mol_type = other RNA
tgtcttgctgggtttccaaa

SEQ ID NO: 544 - RNA, 17 nt, synthetic construct
  source 1..17: mol_type = other RNA
gtgtcttgctgggtttc

SEQ ID NO: 545 - RNA, 18 nt, synthetic construct
  source 1..18: mol_type = other RNA
ggtgtcttgctgggtttc

SEQ ID NO: 546 - RNA, 19 nt, synthetic construct
  source 1..19: mol_type = other RNA
aggtgtcttgctgggtttc

SEQ ID NO: 547 - RNA, 21 nt, synthetic construct
  source 1..21: mol_type = other RNA
acaggtgtcttgctgggtttc

SEQ ID NO: 548 - RNA, 22 nt, synthetic construct
  source 1..22: mol_type = other RNA
gacaggtgtcttgctgggtttc

SEQ ID NO: 549-553 - skipped (5 entries)

SEQ ID NO: 554 - RNA, 10 nt, synthetic construct
  source 1..10: mol_type = other RNA
acccagcaag

SEQ ID NO: 555 - RNA, 11 nt, synthetic construct
  source 1..11: mol_type = other RNA
acccagcaaga

SEQ ID NO: 556 - RNA, 12 nt, synthetic construct
  source 1..12: mol_type = other RNA
acccagcaagac

SEQ ID NO: 557 - RNA, 13 nt, synthetic construct
  source 1..13: mol_type = other RNA
acccagcaagaca

SEQ ID NO: 558 - RNA, 14 nt, synthetic construct
  source 1..14: mol_type = other RNA
acccagcaagacac

SEQ ID NO: 559 - RNA, 15 nt, synthetic construct
  source 1..15: mol_type = other RNA
acccagcaagacacc

SEQ ID NO: 560 - RNA, 16 nt, synthetic construct
  source 1..16: mol_type = other RNA
acccagcaagacacct

SEQ ID NO: 561 - RNA, 17 nt, synthetic construct
  source 1..17: mol_type = other RNA
acccagcaagacacctg

SEQ ID NO: 562 - RNA, 18 nt, synthetic construct
  source 1..18: mol_type = other RNA
acccagcaagacacctgt

SEQ ID NO: 563 - RNA, 19 nt, synthetic construct
  source 1..19: mol_type = other RNA
acccagcaagacacctgtc

SEQ ID NO: 564 - RNA, 21 nt, synthetic construct
  source 1..21: mol_type = other RNA
gatcaggcttccacattggaa

SEQ ID NO: 565 - RNA, 21 nt, synthetic construct
  source 1..21: mol_type = other RNA
gatcaggcttccacgttggaa

SEQ ID NO: 566 - RNA, 21 nt, synthetic construct
  source 1..21: mol_type = other RNA
gatcaggcttccactttggaa

SEQ ID NO: 567 - RNA, 22 nt, synthetic construct
  source 1..22: mol_type = other RNA
ggatcaggcttccacattggaa

SEQ ID NO: 568 - RNA, 22 nt, synthetic construct
  source 1..22: mol_type = other RNA
ggatcaggcttccacgttggaa

SEQ ID NO: 569 - RNA, 22 nt, synthetic construct
  source 1..22: mol_type = other RNA
ggatcaggcttccactttggaa

SEQ ID NO: 570 - RNA, 23 nt, synthetic construct
  source 1..23: mol_type = other RNA
gggatcaggcttccacattggaa

SEQ ID NO: 571 - RNA, 23 nt, synthetic construct
  source 1..23: mol_type = other RNA
gggatcaggcttccacgttggaa

SEQ ID NO: 572 - RNA, 23 nt, synthetic construct
  source 1..23: mol_type = other RNA
gggatcaggcttccactttggaa

SEQ ID NO: 573 - RNA, 24 nt, synthetic construct
  source 1..24: mol_type = other RNA
tgggatcaggcttccacattggaa

SEQ ID NO: 574 - RNA, 24 nt, synthetic construct
  source 1..24: mol_type = other RNA
tgggatcaggcttccacgttggaa

SEQ ID NO: 575 - RNA, 24 nt, synthetic construct
  source 1..24: mol_type = other RNA
tgggatcaggcttccactttggaa

SEQ ID NO: 576 - RNA, 25 nt, synthetic construct
  source 1..25: mol_type = other RNA
atgggatcaggcttccacattggaa

SEQ ID NO: 577 - RNA, 25 nt, synthetic construct
  source 1..25: mol_type = other RNA
atgggatcaggcttccacgttggaa

SEQ ID NO: 578 - RNA, 25 nt, synthetic construct
  source 1..25: mol_type = other RNA
atgggatcaggcttccactttggaa

SEQ ID NO: 579 - RNA, 26 nt, synthetic construct
  source 1..26: mol_type = other RNA
tatgggatcaggcttccacattggaa

SEQ ID NO: 580 - RNA, 26 nt, synthetic construct
  source 1..26: mol_type = other RNA
tatgggatcaggcttccacgttggaa

SEQ ID NO: 581 - RNA, 26 nt, synthetic construct
  source 1..26: mol_type = other RNA
tatgggatcaggcttccactttggaa

SEQ ID NO: 582 - RNA, 27 nt, synthetic construct
  source 1..27: mol_type = other RNA
gtatgggatcaggcttccacattggaa

SEQ ID NO: 583 - RNA, 27 nt, synthetic construct
  source 1..27: mol_type = other RNA
gtatgggatcaggcttccacgttggaa

SEQ ID NO: 584 - RNA, 27 nt, synthetic construct
  source 1..27: mol_type = other RNA
gtatgggatcaggcttccactttggaa

SEQ ID NO: 585 - RNA, 28 nt, synthetic construct
  source 1..28: mol_type = other RNA
tgtatgggatcaggcttccacattggaa

SEQ ID NO: 586 - RNA, 28 nt, synthetic construct
  source 1..28: mol_type = other RNA
tgtatgggatcaggcttccacgttggaa

SEQ ID NO: 587 - RNA, 28 nt, synthetic construct
  source 1..28: mol_type = other RNA
tgtatgggatcaggcttccactttggaa

SEQ ID NO: 588 - RNA, 29 nt, synthetic construct
  source 1..29: mol_type = other RNA
ctgtatgggatcaggcttccacattggaa

SEQ ID NO: 589 - RNA, 29 nt, synthetic construct
  source 1..29: mol_type = other RNA
ctgtatgggatcaggcttccacgttggaa

SEQ ID NO: 590 - RNA, 29 nt, synthetic construct
  source 1..29: mol_type = other RNA
ctgtatgggatcaggcttccactttggaa

SEQ ID NO: 591 - RNA, 30 nt, synthetic construct
  source 1..30: mol_type = other RNA
tctgtatgggatcaggcttccacattggaa

SEQ ID NO: 592 - RNA, 30 nt, synthetic construct
  source 1..30: mol_type = other RNA
tctgtatgggatcaggcttccacgttggaa

SEQ ID NO: 593 - RNA, 30 nt, synthetic construct
  source 1..30: mol_type = other RNA
tctgtatgggatcaggcttccactttggaa

SEQ ID NO: 594 - RNA, 31 nt, synthetic construct
  source 1..31: mol_type = other RNA
ttctgtatgggatcaggcttccacattggaa

SEQ ID NO: 595 - RNA, 31 nt, synthetic construct
  source 1..31: mol_type = other RNA
ttctgtatgggatcaggcttccacgttggaa

SEQ ID NO: 596 - RNA, 31 nt, synthetic construct
  source 1..31: mol_type = other RNA
ttctgtatgggatcaggcttccactttggaa

SEQ ID NO: 597 - RNA, 32 nt, synthetic construct
  source 1..32: mol_type = other RNA
tttctgtatgggatcaggcttccacattggaa

SEQ ID NO: 598 - RNA, 32 nt, synthetic construct
  source 1..32: mol_type = other RNA
tttctgtatgggatcaggcttccacgttggaa

SEQ ID NO: 599 - RNA, 32 nt, synthetic construct
  source 1..32: mol_type = other RNA
tttctgtatgggatcaggcttccactttggaa

SEQ ID NO: 600 - RNA, 33 nt, synthetic construct
  source 1..33: mol_type = other RNA
ctttctgtatgggatcaggcttccacattggaa

SEQ ID NO: 601 - RNA, 33 nt, synthetic construct
  source 1..33: mol_type = other RNA
ctttctgtatgggatcaggcttccacgttggaa

SEQ ID NO: 602 - RNA, 33 nt, synthetic construct
  source 1..33: mol_type = other RNA
ctttctgtatgggatcaggcttccactttggaa

SEQ ID NO: 603 - RNA, 34 nt, synthetic construct
  source 1..34: mol_type = other RNA
gctttctgtatgggatcaggcttccacattggaa

SEQ ID NO: 604 - RNA, 34 nt, synthetic construct
  source 1..34: mol_type = other RNA
gctttctgtatgggatcaggcttccacgttggaa

SEQ ID NO: 605 - RNA, 34 nt, synthetic construct
  source 1..34: mol_type = other RNA
gctttctgtatgggatcaggcttccactttggaa

SEQ ID NO: 606 - RNA, 35 nt, synthetic construct
  source 1..35: mol_type = other RNA
agctttctgtatgggatcaggcttccacattggaa

SEQ ID NO: 607 - RNA, 35 nt, synthetic construct
  source 1..35: mol_type = other RNA
agctttctgtatgggatcaggcttccacgttggaa

SEQ ID NO: 608 - RNA, 35 nt, synthetic construct
  source 1..35: mol_type = other RNA
agctttctgtatgggatcaggcttccactttggaa

SEQ ID NO: 609 - RNA, 36 nt, synthetic construct
  source 1..36: mol_type = other RNA
aagctttctgtatgggatcaggcttccacattggaa

SEQ ID NO: 610 - RNA, 36 nt, synthetic construct
  source 1..36: mol_type = other RNA
aagctttctgtatgggatcaggcttccacgttggaa

SEQ ID NO: 611 - RNA, 36 nt, synthetic construct
  source 1..36: mol_type = other RNA
aagctttctgtatgggatcaggcttccactttggaa

SEQ ID NO: 612 - RNA, 37 nt, synthetic construct
  source 1..37: mol_type = other RNA
gaagctttctgtatgggatcaggcttccacattggaa

SEQ ID NO: 613 - RNA, 37 nt, synthetic construct
  source 1..37: mol_type = other RNA
gaagctttctgtatgggatcaggcttccacgttggaa

SEQ ID NO: 614 - RNA, 37 nt, synthetic construct
  source 1..37: mol_type = other RNA
gaagctttctgtatgggatcaggcttccactttggaa

SEQ ID NO: 615 - RNA, 38 nt, synthetic construct
  source 1..38: mol_type = other RNA
agaagctttctgtatgggatcaggcttccacattggaa

SEQ ID NO: 616 - RNA, 38 nt, synthetic construct
  source 1..38: mol_type = other RNA
agaagctttctgtatgggatcaggcttccacgttggaa

SEQ ID NO: 617 - RNA, 38 nt, synthetic construct
  source 1..38: mol_type = other RNA
agaagctttctgtatgggatcaggcttccactttggaa

SEQ ID NO: 618 - RNA, 39 nt, synthetic construct
  source 1..39: mol_type = other RNA
cagaagctttctgtatgggatcaggcttccacattggaa

SEQ ID NO: 619 - RNA, 39 nt, synthetic construct
  source 1..39: mol_type = other RNA
cagaagctttctgtatgggatcaggcttccacgttggaa

SEQ ID NO: 620 - RNA, 39 nt, synthetic construct
  source 1..39: mol_type = other RNA
cagaagctttctgtatgggatcaggcttccactttggaa

SEQ ID NO: 621 - RNA, 40 nt, synthetic construct
  source 1..40: mol_type = other RNA
gcagaagctttctgtatgggatcaggcttccacattggaa

SEQ ID NO: 622 - RNA, 40 nt, synthetic construct
  source 1..40: mol_type = other RNA
gcagaagctttctgtatgggatcaggcttccacgttggaa

SEQ ID NO: 623 - RNA, 40 nt, synthetic construct
  source 1..40: mol_type = other RNA
gcagaagctttctgtatgggatcaggcttccactttggaa

SEQ ID NO: 624 - RNA, 17 nt, synthetic construct
  source 1..17: mol_type = other RNA
cgtgaagacaggtgtct

SEQ ID NO: 625 - RNA, 18 nt, synthetic construct
  source 1..18: mol_type = other RNA
acgtgaagacaggtgtct

SEQ ID NO: 626 - RNA, 19 nt, synthetic construct
  source 1..19: mol_type = other RNA
cacgtgaagacaggtgtct

SEQ ID NO: 627 - RNA, 21 nt, synthetic construct
  source 1..21: mol_type = other RNA
gccacgtgaagacaggtgtct

SEQ ID NO: 628 - RNA, 22 nt, synthetic construct
  source 1..22: mol_type = other RNA
agccacgtgaagacaggtgtct

SEQ ID NO: 629-633 - skipped (5 entries)

SEQ ID NO: 634 - RNA, 10 nt, synthetic construct
  source 1..10: mol_type = other RNA
cacctgtctt

SEQ ID NO: 635 - RNA, 11 nt, synthetic construct
  source 1..11: mol_type = other RNA
cacctgtcttc

SEQ ID NO: 636 - RNA, 12 nt, synthetic construct
  source 1..12: mol_type = other RNA
cacctgtcttca

SEQ ID NO: 637 - RNA, 13 nt, synthetic construct
  source 1..13: mol_type = other RNA
cacctgtcttcac

SEQ ID NO: 638 - RNA, 14 nt, synthetic construct
  source 1..14: mol_type = other RNA
cacctgtcttcacg

SEQ ID NO: 639 - RNA, 15 nt, synthetic construct
  source 1..15: mol_type = other RNA
cacctgtcttcacgt

SEQ ID NO: 640 - RNA, 16 nt, synthetic construct
  source 1..16: mol_type = other RNA
cacctgtcttcacgtg

SEQ ID NO: 641 - RNA, 17 nt, synthetic construct
  source 1..17: mol_type = other RNA
cacctgtcttcacgtgg

SEQ ID NO: 642 - RNA, 18 nt, synthetic construct
  source 1..18: mol_type = other RNA
cacctgtcttcacgtggc

SEQ ID NO: 643 - RNA, 19 nt, synthetic construct
  source 1..19: mol_type = other RNA
cacctgtcttcacgtggct

SEQ ID NO: 644 - RNA, 32 nt, synthetic construct
  source 1..32: mol_type = other RNA
gatcaggcttccactttggaaacccagcaaga

SEQ ID NO: 645 - RNA, 33 nt, synthetic construct
  source 1..33: mol_type = other RNA
ggatcaggcttccactttggaaacccagcaaga

SEQ ID NO: 646 - RNA, 34 nt, synthetic construct
  source 1..34: mol_type = other RNA
gggatcaggcttccactttggaaacccagcaaga

SEQ ID NO: 647 - RNA, 35 nt, synthetic construct
  source 1..35: mol_type = other RNA
tgggatcaggcttccactttggaaacccagcaaga

SEQ ID NO: 648 - RNA, 36 nt, synthetic construct
  source 1..36: mol_type = other RNA
atgggatcaggcttccactttggaaacccagcaaga

SEQ ID NO: 649 - RNA, 37 nt, synthetic construct
  source 1..37: mol_type = other RNA
tatgggatcaggcttccactttggaaacccagcaaga

SEQ ID NO: 650 - RNA, 38 nt, synthetic construct
  source 1..38: mol_type = other RNA
gtatgggatcaggcttccactttggaaacccagcaaga

SEQ ID NO: 651 - RNA, 39 nt, synthetic construct
  source 1..39: mol_type = other RNA
tgtatgggatcaggcttccactttggaaacccagcaaga

SEQ ID NO: 652 - RNA, 40 nt, synthetic construct
  source 1..40: mol_type = other RNA
ctgtatgggatcaggcttccactttggaaacccagcaaga

SEQ ID NO: 653 - RNA, 17 nt, synthetic construct
  source 1..17: mol_type = other RNA
gaagacaggtgtcttgc

SEQ ID NO: 654 - RNA, 18 nt, synthetic construct
  source 1..18: mol_type = other RNA
tgaagacaggtgtcttgc

SEQ ID NO: 655 - RNA, 19 nt, synthetic construct
  source 1..19: mol_type = other RNA
gtgaagacaggtgtcttgc

SEQ ID NO: 656 - RNA, 21 nt, synthetic construct
  source 1..21: mol_type = other RNA
acgtgaagacaggtgtcttgc

SEQ ID NO: 657 - RNA, 22 nt, synthetic construct
  source 1..22: mol_type = other RNA
cacgtgaagacaggtgtcttgc

SEQ ID NO: 658-662 - skipped (5 entries)

SEQ ID NO: 663 - RNA, 10 nt, synthetic construct
  source 1..10: mol_type = other RNA
agacacctgt

SEQ ID NO: 664 - RNA, 11 nt, synthetic construct
  source 1..11: mol_type = other RNA
agacacctgtc

SEQ ID NO: 665 - RNA, 12 nt, synthetic construct
  source 1..12: mol_type = other RNA
agacacctgtct

SEQ ID NO: 666 - RNA, 13 nt, synthetic construct
  source 1..13: mol_type = other RNA
agacacctgtctt

SEQ ID NO: 667 - RNA, 14 nt, synthetic construct
  source 1..14: mol_type = other RNA
agacacctgtcttc

SEQ ID NO: 668 - RNA, 15 nt, synthetic construct
  source 1..15: mol_type = other RNA
agacacctgtcttca

SEQ ID NO: 669 - RNA, 16 nt, synthetic construct
  source 1..16: mol_type = other RNA
agacacctgtcttcac

SEQ ID NO: 670 - RNA, 17 nt, synthetic construct
  source 1..17: mol_type = other RNA
agacacctgtcttcacg

SEQ ID NO: 671 - RNA, 18 nt, synthetic construct
  source 1..18: mol_type = other RNA
agacacctgtcttcacgt

SEQ ID NO: 672 - RNA, 19 nt, synthetic construct
  source 1..19: mol_type = other RNA
agacacctgtcttcacgtg

SEQ ID NO: 673 - RNA, 29 nt, synthetic construct
  source 1..29: mol_type = other RNA
gatcaggcttccactttggaaacacagca

SEQ ID NO: 674 - RNA, 29 nt, synthetic construct
  source 1..29: mol_type = other RNA
gatcaggcttccactttggaaacccagca

SEQ ID NO: 675 - RNA, 29 nt, synthetic construct
  source 1..29: mol_type = other RNA
gatcaggcttccactttggaaacgcagca

SEQ ID NO: 676 - RNA, 29 nt, synthetic construct
  source 1..29: mol_type = other RNA
gatcaggcttccactttggaaactcagca

SEQ ID NO: 677 - RNA, 30 nt, synthetic construct
  source 1..30: mol_type = other RNA
ggatcaggcttccactttggaaacacagca

SEQ ID NO: 678 - RNA, 30 nt, synthetic construct
  source 1..30: mol_type = other RNA
ggatcaggcttccactttggaaacccagca

SEQ ID NO: 679 - RNA, 30 nt, synthetic construct
  source 1..30: mol_type = other RNA
ggatcaggcttccactttggaaacgcagca

SEQ ID NO: 680 - RNA, 30 nt, synthetic construct
  source 1..30: mol_type = other RNA
ggatcaggcttccactttggaaactcagca

SEQ ID NO: 681 - RNA, 31 nt, synthetic construct
  source 1..31: mol_type = other RNA
gggatcaggcttccactttggaaacacagca

SEQ ID NO: 682 - RNA, 31 nt, synthetic construct
  source 1..31: mol_type = other RNA
gggatcaggcttccactttggaaacccagca

SEQ ID NO: 683 - RNA, 31 nt, synthetic construct
  source 1..31: mol_type = other RNA
gggatcaggcttccactttggaaacgcagca

SEQ ID NO: 684 - RNA, 31 nt, synthetic construct
  source 1..31: mol_type = other RNA
gggatcaggcttccactttggaaactcagca

SEQ ID NO: 685 - RNA, 32 nt, synthetic construct
  source 1..32: mol_type = other RNA
tgggatcaggcttccactttggaaacacagca

SEQ ID NO: 686 - RNA, 32 nt, synthetic construct
  source 1..32: mol_type = other RNA
tgggatcaggcttccactttggaaacccagca

SEQ ID NO: 687 - RNA, 32 nt, synthetic construct
  source 1..32: mol_type = other RNA
tgggatcaggcttccactttggaaacgcagca

SEQ ID NO: 688 - RNA, 32 nt, synthetic construct
  source 1..32: mol_type = other RNA
tgggatcaggcttccactttggaaactcagca

SEQ ID NO: 689 - RNA, 33 nt, synthetic construct
  source 1..33: mol_type = other RNA
atgggatcaggcttccactttggaaacacagca

SEQ ID NO: 690 - RNA, 33 nt, synthetic construct
  source 1..33: mol_type = other RNA
atgggatcaggcttccactttggaaacccagca

SEQ ID NO: 691 - RNA, 33 nt, synthetic construct
  source 1..33: mol_type = other RNA
atgggatcaggcttccactttggaaacgcagca

SEQ ID NO: 692 - RNA, 33 nt, synthetic construct
  source 1..33: mol_type = other RNA
atgggatcaggcttccactttggaaactcagca

SEQ ID NO: 693 - RNA, 34 nt, synthetic construct
  source 1..34: mol_type = other RNA
tatgggatcaggcttccactttggaaacacagca

SEQ ID NO: 694 - RNA, 34 nt, synthetic construct
  source 1..34: mol_type = other RNA
tatgggatcaggcttccactttggaaacccagca

SEQ ID NO: 695 - RNA, 34 nt, synthetic construct
  source 1..34: mol_type = other RNA
tatgggatcaggcttccactttggaaacgcagca

SEQ ID NO: 696 - RNA, 34 nt, synthetic construct
  source 1..34: mol_type = other RNA
tatgggatcaggcttccactttggaaactcagca

SEQ ID NO: 697 - RNA, 35 nt, synthetic construct
  source 1..35: mol_type = other RNA
gtatgggatcaggcttccactttggaaacacagca

SEQ ID NO: 698 - RNA, 35 nt, synthetic construct
  source 1..35: mol_type = other RNA
gtatgggatcaggcttccactttggaaacccagca

SEQ ID NO: 699 - RNA, 35 nt, synthetic construct
  source 1..35: mol_type = other RNA
gtatgggatcaggcttccactttggaaacgcagca

SEQ ID NO: 700 - RNA, 35 nt, synthetic construct
  source 1..35: mol_type = other RNA
gtatgggatcaggcttccactttggaaactcagca

SEQ ID NO: 701 - RNA, 36 nt, synthetic construct
  source 1..36: mol_type = other RNA
tgtatgggatcaggcttccactttggaaacacagca

SEQ ID NO: 702 - RNA, 36 nt, synthetic construct
  source 1..36: mol_type = other RNA
tgtatgggatcaggcttccactttggaaacccagca

SEQ ID NO: 703 - RNA, 36 nt, synthetic construct
  source 1..36: mol_type = other RNA
tgtatgggatcaggcttccactttggaaacgcagca

SEQ ID NO: 704 - RNA, 36 nt, synthetic construct
  source 1..36: mol_type = other RNA
tgtatgggatcaggcttccactttggaaactcagca

SEQ ID NO: 705 - RNA, 37 nt, synthetic construct
  source 1..37: mol_type = other RNA
ctgtatgggatcaggcttccactttggaaacacagca

SEQ ID NO: 706 - RNA, 37 nt, synthetic construct
  source 1..37: mol_type = other RNA
ctgtatgggatcaggcttccactttggaaacccagca

SEQ ID NO: 707 - RNA, 37 nt, synthetic construct
  source 1..37: mol_type = other RNA
ctgtatgggatcaggcttccactttggaaacgcagca

SEQ ID NO: 708 - RNA, 37 nt, synthetic construct
  source 1..37: mol_type = other RNA
ctgtatgggatcaggcttccactttggaaactcagca

SEQ ID NO: 709 - RNA, 38 nt, synthetic construct
  source 1..38: mol_type = other RNA
tctgtatgggatcaggcttccactttggaaacacagca

SEQ ID NO: 710 - RNA, 38 nt, synthetic construct
  source 1..38: mol_type = other RNA
tctgtatgggatcaggcttccactttggaaacccagca

SEQ ID NO: 711 - RNA, 38 nt, synthetic construct
  source 1..38: mol_type = other RNA
tctgtatgggatcaggcttccactttggaaacgcagca

SEQ ID NO: 712 - RNA, 38 nt, synthetic construct
  source 1..38: mol_type = other RNA
tctgtatgggatcaggcttccactttggaaactcagca

SEQ ID NO: 713 - RNA, 39 nt, synthetic construct
  source 1..39: mol_type = other RNA
ttctgtatgggatcaggcttccactttggaaacacagca

SEQ ID NO: 714 - RNA, 39 nt, synthetic construct
  source 1..39: mol_type = other RNA
ttctgtatgggatcaggcttccactttggaaacccagca

SEQ ID NO: 715 - RNA, 39 nt, synthetic construct
  source 1..39: mol_type = other RNA
ttctgtatgggatcaggcttccactttggaaacgcagca

SEQ ID NO: 716 - RNA, 39 nt, synthetic construct
  source 1..39: mol_type = other RNA
ttctgtatgggatcaggcttccactttggaaactcagca

SEQ ID NO: 717 - RNA, 40 nt, synthetic construct
  source 1..40: mol_type = other RNA
tttctgtatgggatcaggcttccactttggaaacacagca

SEQ ID NO: 718 - RNA, 40 nt, synthetic construct
  source 1..40: mol_type = other RNA
tttctgtatgggatcaggcttccactttggaaacccagca

SEQ ID NO: 719 - RNA, 40 nt, synthetic construct
  source 1..40: mol_type = other RNA
tttctgtatgggatcaggcttccactttggaaacgcagca

SEQ ID NO: 720 - RNA, 40 nt, synthetic construct
  source 1..40: mol_type = other RNA
tttctgtatgggatcaggcttccactttggaaactcagca

SEQ ID NO: 721 - RNA, 137 nt, synthetic construct
  source 1..137: mol_type = other RNA
cgtgaagacaggtgtcttgcgttttagagctagaaatagcaagttaaaataaggctagtccgttatcaacttgaaaaagtggcaccgagtcggtgcatgggatcaggcttccactttggaaacccagcaagacacct

SEQ ID NO: 722 - RNA, 139 nt, synthetic construct
  source 1..139: mol_type = other RNA
cgtgaagacaggtgtcttgcgttttagagctagaaatagcaagttaaaataaggctagtccgttatcaacttgaaaaagtggcaccgagtcggtgcatgggatcaggcttccactttggaaacccagcaagacacctgt

SEQ ID NO: 723 - RNA, 139 nt, synthetic construct
  source 1..139: mol_type = other RNA
cgtgaagacaggtgtcttgcgttttagagctagaaatagcaagttaaaataaggctagtccgttatcaacttgaaaaagtggcaccgagtcggtgcgtatgggatcaggcttccactttggaaacccagcaagacacct

SEQ ID NO: 724 - RNA, 141 nt, synthetic construct
  source 1..141: mol_type = other RNA
cgtgaagacaggtgtcttgcgttttagagctagaaatagcaagttaaaataaggctagtccgttatcaacttgaaaaagtggcaccgagtcggtgcatgggatcaggcttccactttggaaacccagcaagacacctgtct

SEQ ID NO: 725 - RNA, 141 nt, synthetic construct
  source 1..141: mol_type = other RNA
cgtgaagacaggtgtcttgcgttttagagctagaaatagcaagttaaaataaggctagtccgttatcaacttgaaaaagtggcaccgagtcggtgcgtatgggatcaggcttccactttggaaacccagcaagacacctgt

SEQ ID NO: 726 - RNA, 142 nt, synthetic construct
  source 1..142: mol_type = other RNA
cgtgaagacaggtgtcttgcgttttagagctagaaatagcaagttaaaataaggctagtccgttatcaacttgaaaaagtggcaccgagtcggtgctctgtatgggatcaggcttccactttggaaacccagcaagacacct

SEQ ID NO: 727 - RNA, 142 nt, synthetic construct
  source 1..142: mol_type = other RNA
gcgtgaagacaggtgtcttgcgttttagagctagaaatagcaagttaaaataaggctagtccgttatcaacttgaaaaagtggcaccgagtcggtgcatgggatcaggcttccactttggaaacccagcaagacaccttttt

SEQ ID NO: 728 - RNA, 143 nt, synthetic construct
  source 1..143: mol_type = other RNA
cgtgaagacaggtgtcttgcgttttagagctagaaatagcaagttaaaataaggctagtccgttatcaacttgaaaaagtggcaccgagtcggtgcatgggatcaggcttccactttggaaacccagcaagacacctgtcttc

SEQ ID NO: 729 - RNA, 143 nt, synthetic construct
  source 1..143: mol_type = other RNA
cgtgaagacaggtgtcttgcgttttagagctagaaatagcaagttaaaataaggctagtccgttatcaacttgaaaaagtggcaccgagtcggtgcgtatgggatcaggcttccactttggaaacccagcaagacacctgtct

SEQ ID NO: 730 - RNA, 144 nt, synthetic construct
  source 1..144: mol_type = other RNA
cgtgaagacaggtgtcttgcgttttagagctagaaatagcaagttaaaataaggctagtccgttatcaacttgaaaaagtggcaccgagtcggtgctctgtatgggatcaggcttccactttggaaacccagcaagacacctgt

SEQ ID NO: 731 - RNA, 144 nt, synthetic construct
  source 1..144: mol_type = other RNA
cgtgaagacaggtgtcttgcgttttagagctagaaatagcaagttaaaataaggctagtccgttatcaacttgaaaaagtggcaccgagtcggtgctttctgtatgggatcaggcttccactttggaaacccagcaagacacct

SEQ ID NO: 732 - RNA, 144 nt, synthetic construct
  source 1..144: mol_type = other RNA
gcgtgaagacaggtgtcttgcgttttagagctagaaatagcaagttaaaataaggctagtccgttatcaacttgaaaaagtggcaccgagtcggtgcatgggatcaggcttccactttggaaacccagcaagacacctgttttt

SEQ ID NO: 733 - RNA, 144 nt, synthetic construct
  source 1..144: mol_type = other RNA
gcgtgaagacaggtgtcttgcgttttagagctagaaatagcaagttaaaataaggctagtccgttatcaacttgaaaaagtggcaccgagtcggtgcgtatgggatcaggcttccactttggaaacccagcaagacaccttttt

SEQ ID NO: 734 - RNA, 145 nt, synthetic construct
  source 1..145: mol_type = other RNA
cgtgaagacaggtgtcttgcgttttagagctagaaatagcaagttaaaataaggctagtccgttatcaacttgaaaaagtggcaccgagtcggtgcgtatgggatcaggcttccactttggaaacccagcaagacacctgtcttc

SEQ ID NO: 735 - RNA, 146 nt, synthetic construct
  source 1..146: mol_type = other RNA
cgtgaagacaggtgtcttgcgttttagagctagaaatagcaagttaaaataaggctagtccgttatcaacttgaaaaagtggcaccgagtcggtgctctgtatgggatcaggcttccactttggaaacccagcaagacacctgtct

SEQ ID NO: 736 - RNA, 146 nt, synthetic construct
  source 1..146: mol_type = other RNA
cgtgaagacaggtgtcttgcgttttagagctagaaatagcaagttaaaataaggctagtccgttatcaacttgaaaaagtggcaccgagtcggtgctttctgtatgggatcaggcttccactttggaaacccagcaagacacctgt

SEQ ID NO: 737 - RNA, 146 nt, synthetic construct
  source 1..146: mol_type = other RNA
gcgtgaagacaggtgtcttgcgttttagagctagaaatagcaagttaaaataaggctagtccgttatcaacttgaaaaagtggcaccgagtcggtgcatgggatcaggcttccactttggaaacccagcaagacacctgtcttttt

SEQ ID NO: 738 - RNA, 146 nt, synthetic construct
  source 1..146: mol_type = other RNA
gcgtgaagacaggtgtcttgcgttttagagctagaaatagcaagttaaaataaggctagtccgttatcaacttgaaaaagtggcaccgagtcggtgcgtatgggatcaggcttccactttggaaacccagcaagacacctgttttt

SEQ ID NO: 739 - RNA, 147 nt, synthetic construct
  source 1..147: mol_type = other RNA
gcgtgaagacaggtgtcttgcgttttagagctagaaatagcaagttaaaataaggctagtccgttatcaacttgaaaaagtggcaccgagtcggtgctctgtatgggatcaggcttccactttggaaacccagcaagacaccttttt

SEQ ID NO: 740 - RNA, 148 nt, synthetic construct
  source 1..148: mol_type = other RNA
cgtgaagacaggtgtcttgcgttttagagctagaaatagcaagttaaaataaggctagtccgttatcaacttgaaaaagtggcaccgagtcggtgctctgtatgggatcaggcttccactttggaaacccagcaagacacctgtcttc

SEQ ID NO: 741 - RNA, 148 nt, synthetic construct
  source 1..148: mol_type = other RNA
cgtgaagacaggtgtcttgcgttttagagctagaaatagcaagttaaaataaggctagtccgttatcaacttgaaaaagtggcaccgagtcggtgctttctgtatgggatcaggcttccactttggaaacccagcaagacacctgtct

SEQ ID NO: 742 - RNA, 148 nt, synthetic construct
  source 1..148: mol_type = other RNA
gcgtgaagacaggtgtcttgcgttttagagctagaaatagcaagttaaaataaggctagtccgttatcaacttgaaaaagtggcaccgagtcggtgcatgggatcaggcttccactttggaaacccagcaagacacctgtcttctttt

SEQ ID NO: 743 - RNA, 148 nt, synthetic construct
  source 1..148: mol_type = other RNA
gcgtgaagacaggtgtcttgcgttttagagctagaaatagcaagttaaaataaggctagtccgttatcaacttgaaaaagtggcaccgagtcggtgcgtatgggatcaggcttccactttggaaacccagcaagacacctgtcttttt

SEQ ID NO: 744 - RNA, 149 nt, synthetic construct
  source 1..149: mol_type = other RNA
gcgtgaagacaggtgtcttgcgttttagagctagaaatagcaagttaaaataaggctagtccgttatcaacttgaaaaagtggcaccgagtcggtgctctgtatgggatcaggcttccactttggaaacccagcaagacacctgttttt

SEQ ID NO: 745 - RNA, 149 nt, synthetic construct
  source 1..149: mol_type = other RNA
gcgtgaagacaggtgtcttgcgttttagagctagaaatagcaagttaaaataaggctagtccgttatcaacttgaaaaagtggcaccgagtcggtgctttctgtatgggatcaggcttccactttggaaacccagcaagacaccttttt

SEQ ID NO: 746 - RNA, 150 nt, synthetic construct
  source 1..150: mol_type = other RNA
cgtgaagacaggtgtcttgcgttttagagctagaaatagcaagttaaaataaggctagtccgttatcaacttgaaaaagtggcaccgagtcggtgctttctgtatgggatcaggcttccactttggaaacccagcaagacacctgtcttc

SEQ ID NO: 747 - RNA, 150 nt, synthetic construct
  source 1..150: mol_type = other RNA
gcgtgaagacaggtgtcttgcgttttagagctagaaatagcaagttaaaataaggctagtccgttatcaacttgaaaaagtggcaccgagtcggtgcgtatgggatcaggcttccactttggaaacccagcaagacacctgtcttctttt

SEQ ID NO: 748 - RNA, 151 nt, synthetic construct
  source 1..151: mol_type = other RNA
gcgtgaagacaggtgtcttgcgttttagagctagaaatagcaagttaaaataaggctagtccgttatcaacttgaaaaagtggcaccgagtcggtgctctgtatgggatcaggcttccactttggaaacccagcaagacacctgtcttttt

SEQ ID NO: 749 - RNA, 151 nt, synthetic construct
  source 1..151: mol_type = other RNA
gcgtgaagacaggtgtcttgcgttttagagctagaaatagcaagttaaaataaggctagtccgttatcaacttgaaaaagtggcaccgagtcggtgctttctgtatgggatcaggcttccactttggaaacccagcaagacacctgttttt

SEQ ID NO: 750 - RNA, 153 nt, synthetic construct
  source 1..153: mol_type = other RNA
gcgtgaagacaggtgtcttgcgttttagagctagaaatagcaagttaaaataaggctagtccgttatcaacttgaaaaagtggcaccgagtcggtgctctgtatgggatcaggcttccactttggaaacccagcaagacacctgtcttctttt

SEQ ID NO: 751 - RNA, 153 nt, synthetic construct
  source 1..153: mol_type = other RNA
gcgtgaagacaggtgtcttgcgttttagagctagaaatagcaagttaaaataaggctagtccgttatcaacttgaaaaagtggcaccgagtcggtgctttctgtatgggatcaggcttccactttggaaacccagcaagacacctgtcttttt

SEQ ID NO: 752 - RNA, 155 nt, synthetic construct
  source 1..155: mol_type = other RNA
gcgtgaagacaggtgtcttgcgttttagagctagaaatagcaagttaaaataaggctagtccgttatcaacttgaaaaagtggcaccgagtcggtgctttctgtatgggatcaggcttccactttggaaacccagcaagacacctgtcttctttt

SEQ ID NO: 753 - RNA, 17 nt, synthetic construct
  source 1..17: mol_type = other RNA
agccacgtgaagacagg

SEQ ID NO: 754 - RNA, 18 nt, synthetic construct
  source 1..18: mol_type = other RNA
gagccacgtgaagacagg

SEQ ID NO: 755 - RNA, 19 nt, synthetic construct
  source 1..19: mol_type = other RNA
tgagccacgtgaagacagg

SEQ ID NO: 756 - RNA, 21 nt, synthetic construct
  source 1..21: mol_type = other RNA
actgagccacgtgaagacagg

SEQ ID NO: 757 - RNA, 22 nt, synthetic construct
  source 1..22: mol_type = other RNA
aactgagccacgtgaagacagg

SEQ ID NO: 758-762 - skipped (5 entries)

SEQ ID NO: 763 - RNA, 10 nt, synthetic construct
  source 1..10: mol_type = other RNA
gtcttcacgt

SEQ ID NO: 764 - RNA, 11 nt, synthetic construct
  source 1..11: mol_type = other RNA
gtcttcacgtg

SEQ ID NO: 765 - RNA, 12 nt, synthetic construct
  source 1..12: mol_type = other RNA
gtcttcacgtgg

SEQ ID NO: 766 - RNA, 13 nt, synthetic construct
  source 1..13: mol_type = other RNA
gtcttcacgtggc

SEQ ID NO: 767 - RNA, 14 nt, synthetic construct
  source 1..14: mol_type = other RNA
gtcttcacgtggct

SEQ ID NO: 768 - RNA, 15 nt, synthetic construct
  source 1..15: mol_type = other RNA
gtcttcacgtggctc

SEQ ID NO: 769 - RNA, 16 nt, synthetic construct
  source 1..16: mol_type = other RNA
gtcttcacgtggctca

SEQ ID NO: 770 - RNA, 17 nt, synthetic construct
  source 1..17: mol_type = other RNA
gtcttcacgtggctcag

SEQ ID NO: 771 - RNA, 18 nt, synthetic construct
  source 1..18: mol_type = other RNA
gtcttcacgtggctcagt

SEQ ID NO: 772 - RNA, 19 nt, synthetic construct
  source 1..19: mol_type = other RNA
gtcttcacgtggctcagtt

SEQ ID NO: 773 - RNA, 37 nt, synthetic construct
  source 1..37: mol_type = other RNA
gatcaggcttccactttggaaacccagcaagacacct

SEQ ID NO: 774 - RNA, 37 nt, synthetic construct
  source 1..37: mol_type = other RNA
gatcaggcttccactttggaaacccagcaagatacct

SEQ ID NO: 775 - RNA, 38 nt, synthetic construct
  source 1..38: mol_type = other RNA
ggatcaggcttccactttggaaacccagcaagacacct

SEQ ID NO: 776 - RNA, 38 nt, synthetic construct
  source 1..38: mol_type = other RNA
ggatcaggcttccactttggaaacccagcaagatacct

SEQ ID NO: 777 - RNA, 39 nt, synthetic construct
  source 1..39: mol_type = other RNA
gggatcaggcttccactttggaaacccagcaagacacct

SEQ ID NO: 778 - RNA, 39 nt, synthetic construct
  source 1..39: mol_type = other RNA
gggatcaggcttccactttggaaacccagcaagatacct

SEQ ID NO: 779 - RNA, 40 nt, synthetic construct
  source 1..40: mol_type = other RNA
tgggatcaggcttccactttggaaacccagcaagacacct

SEQ ID NO: 780 - RNA, 40 nt, synthetic construct
  source 1..40: mol_type = other RNA
tgggatcaggcttccactttggaaacccagcaagatacct

SEQ ID NO: 781 - RNA, 20 nt, synthetic construct
  source 1..20: mol_type = other RNA
tggaaacccagcaagatacc

SEQ ID NO: 782 - RNA, 17 nt, synthetic construct
  source 1..17: mol_type = other RNA
ggtttccaaagtggaag

SEQ ID NO: 783 - RNA, 18 nt, synthetic construct
  source 1..18: mol_type = other RNA
gggtttccaaagtggaag

SEQ ID NO: 784 - RNA, 19 nt, synthetic construct
  source 1..19: mol_type = other RNA
tgggtttccaaagtggaag

SEQ ID NO: 785 - RNA, 21 nt, synthetic construct
  source 1..21: mol_type = other RNA
gctgggtttccaaagtggaag

SEQ ID NO: 786 - RNA, 22 nt, synthetic construct
  source 1..22: mol_type = other RNA
tgctgggtttccaaagtggaag

SEQ ID NO: 787-791 - skipped (5 entries)

SEQ ID NO: 792 - RNA, 10 nt, synthetic construct
  source 1..10: mol_type = other RNA
ccactttgga

SEQ ID NO: 793 - RNA, 11 nt, synthetic construct
  source 1..11: mol_type = other RNA
ccactttggaa

SEQ ID NO: 794 - RNA, 12 nt, synthetic construct
  source 1..12: mol_type = other RNA
ccactttggaaa

SEQ ID NO: 795 - RNA, 13 nt, synthetic construct
  source 1..13: mol_type = other RNA
ccactttggaaac

SEQ ID NO: 796 - RNA, 14 nt, synthetic construct
  source 1..14: mol_type = other RNA
ccactttggaaacc

SEQ ID NO: 797 - RNA, 15 nt, synthetic construct
  source 1..15: mol_type = other RNA
ccactttggaaaccc

SEQ ID NO: 798 - RNA, 16 nt, synthetic construct
  source 1..16: mol_type = other RNA
ccactttggaaaccca

SEQ ID NO: 799 - RNA, 17 nt, synthetic construct
  source 1..17: mol_type = other RNA
ccactttggaaacccag

SEQ ID NO: 800 - RNA, 18 nt, synthetic construct
  source 1..18: mol_type = other RNA
ccactttggaaacccagc

SEQ ID NO: 801 - RNA, 19 nt, synthetic construct
  source 1..19: mol_type = other RNA
ccactttggaaacccagca

SEQ ID NO: 802 - RNA, 10 nt, synthetic construct
  source 1..10: mol_type = other RNA
gatcaggctt

SEQ ID NO: 803 - RNA, 11 nt, synthetic construct
  source 1..11: mol_type = other RNA
ggatcaggctt

SEQ ID NO: 804 - RNA, 12 nt, synthetic construct
  source 1..12: mol_type = other RNA
gggatcaggctt

SEQ ID NO: 805 - RNA, 13 nt, synthetic construct
  source 1..13: mol_type = other RNA
tgggatcaggctt

SEQ ID NO: 806 - RNA, 14 nt, synthetic construct
  source 1..14: mol_type = other RNA
atgggatcaggctt

SEQ ID NO: 807 - RNA, 15 nt, synthetic construct
  source 1..15: mol_type = other RNA
tatgggatcaggctt

SEQ ID NO: 808 - RNA, 16 nt, synthetic construct
  source 1..16: mol_type = other RNA
gtatgggatcaggctt

SEQ ID NO: 809 - RNA, 17 nt, synthetic construct
  source 1..17: mol_type = other RNA
tgtatgggatcaggctt

SEQ ID NO: 810 - RNA, 18 nt, synthetic construct
  source 1..18: mol_type = other RNA
ctgtatgggatcaggctt

SEQ ID NO: 811 - RNA, 19 nt, synthetic construct
  source 1..19: mol_type = other RNA
tctgtatgggatcaggctt

SEQ ID NO: 812 - RNA, 20 nt, synthetic construct
  source 1..20: mol_type = other RNA
ttctgtatgggatcaggctt

SEQ ID NO: 813 - RNA, 21 nt, synthetic construct
  source 1..21: mol_type = other RNA
tttctgtatgggatcaggctt

SEQ ID NO: 814 - RNA, 22 nt, synthetic construct
  source 1..22: mol_type = other RNA
ctttctgtatgggatcaggctt

SEQ ID NO: 815 - RNA, 23 nt, synthetic construct
  source 1..23: mol_type = other RNA
gctttctgtatgggatcaggctt

SEQ ID NO: 816 - RNA, 24 nt, synthetic construct
  source 1..24: mol_type = other RNA
agctttctgtatgggatcaggctt

SEQ ID NO: 817 - RNA, 25 nt, synthetic construct
  source 1..25: mol_type = other RNA
aagctttctgtatgggatcaggctt

SEQ ID NO: 818 - RNA, 26 nt, synthetic construct
  source 1..26: mol_type = other RNA
gaagctttctgtatgggatcaggctt

SEQ ID NO: 819 - RNA, 27 nt, synthetic construct
  source 1..27: mol_type = other RNA
agaagctttctgtatgggatcaggctt

SEQ ID NO: 820 - RNA, 28 nt, synthetic construct
  source 1..28: mol_type = other RNA
cagaagctttctgtatgggatcaggctt

SEQ ID NO: 821 - RNA, 29 nt, synthetic construct
  source 1..29: mol_type = other RNA
gcagaagctttctgtatgggatcaggctt

SEQ ID NO: 822 - RNA, 30 nt, synthetic construct
  source 1..30: mol_type = other RNA
tgcagaagctttctgtatgggatcaggctt

SEQ ID NO: 823 - RNA, 31 nt, synthetic construct
  source 1..31: mol_type = other RNA
atgcagaagctttctgtatgggatcaggctt

SEQ ID NO: 824 - RNA, 32 nt, synthetic construct
  source 1..32: mol_type = other RNA
gatgcagaagctttctgtatgggatcaggctt

SEQ ID NO: 825 - RNA, 33 nt, synthetic construct
  source 1..33: mol_type = other RNA
ggatgcagaagctttctgtatgggatcaggctt

SEQ ID NO: 826 - RNA, 34 nt, synthetic construct
  source 1..34: mol_type = other RNA
tggatgcagaagctttctgtatgggatcaggctt

SEQ ID NO: 827 - RNA, 35 nt, synthetic construct
  source 1..35: mol_type = other RNA
ttggatgcagaagctttctgtatgggatcaggctt

SEQ ID NO: 828 - RNA, 36 nt, synthetic construct
  source 1..36: mol_type = other RNA
tttggatgcagaagctttctgtatgggatcaggctt

SEQ ID NO: 829 - RNA, 37 nt, synthetic construct
  source 1..37: mol_type = other RNA
ttttggatgcagaagctttctgtatgggatcaggctt

SEQ ID NO: 830 - RNA, 38 nt, synthetic construct
  source 1..38: mol_type = other RNA
gttttggatgcagaagctttctgtatgggatcaggctt

SEQ ID NO: 831 - RNA, 39 nt, synthetic construct
  source 1..39: mol_type = other RNA
agttttggatgcagaagctttctgtatgggatcaggctt

SEQ ID NO: 832 - RNA, 40 nt, synthetic construct
  source 1..40: mol_type = other RNA
cagttttggatgcagaagctttctgtatgggatcaggctt

SEQ ID NO: 833 - RNA, 17 nt, synthetic construct
  source 1..17: mol_type = other RNA
tcttgtgattatcagtt

SEQ ID NO: 834 - RNA, 18 nt, synthetic construct
  source 1..18: mol_type = other RNA
ttcttgtgattatcagtt

SEQ ID NO: 835 - RNA, 19 nt, synthetic construct
  source 1..19: mol_type = other RNA
tttcttgtgattatcagtt

SEQ ID NO: 836 - RNA, 21 nt, synthetic construct
  source 1..21: mol_type = other RNA
tctttcttgtgattatcagtt

SEQ ID NO: 837 - RNA, 22 nt, synthetic construct
  source 1..22: mol_type = other RNA
atctttcttgtgattatcagtt

SEQ ID NO: 838-842 - skipped (5 entries)

SEQ ID NO: 843 - RNA, 10 nt, synthetic construct
  source 1..10: mol_type = other RNA
tgataatcac

SEQ ID NO: 844 - RNA, 11 nt, synthetic construct
  source 1..11: mol_type = other RNA
tgataatcaca

SEQ ID NO: 845 - RNA, 12 nt, synthetic construct
  source 1..12: mol_type = other RNA
tgataatcacaa

SEQ ID NO: 846 - RNA, 13 nt, synthetic construct
  source 1..13: mol_type = other RNA
tgataatcacaag

SEQ ID NO: 847 - RNA, 14 nt, synthetic construct
  source 1..14: mol_type = other RNA
tgataatcacaaga

SEQ ID NO: 848 - RNA, 15 nt, synthetic construct
  source 1..15: mol_type = other RNA
tgataatcacaagaa

SEQ ID NO: 849 - RNA, 16 nt, synthetic construct
  source 1..16: mol_type = other RNA
tgataatcacaagaaa

SEQ ID NO: 850 - RNA, 17 nt, synthetic construct
  source 1..17: mol_type = other RNA
tgataatcacaagaaag

SEQ ID NO: 851 - RNA, 18 nt, synthetic construct
  source 1..18: mol_type = other RNA
tgataatcacaagaaaga

SEQ ID NO: 852 - RNA, 19 nt, synthetic construct
  source 1..19: mol_type = other RNA
tgataatcacaagaaagat

SEQ ID NO: 853 - RNA, 29 nt, synthetic construct
  source 1..29: mol_type = other RNA
cccatacagaaagcttctgcatccaaaac

SEQ ID NO: 854 - RNA, 30 nt, synthetic construct
  source 1..30: mol_type = other RNA
tcccatacagaaagcttctgcatccaaaac

SEQ ID NO: 855 - RNA, 31 nt, synthetic construct
  source 1..31: mol_type = other RNA
atcccatacagaaagcttctgcatccaaaac

SEQ ID NO: 856 - RNA, 32 nt, synthetic construct
  source 1..32: mol_type = other RNA
gatcccatacagaaagcttctgcatccaaaac

SEQ ID NO: 857 - RNA, 33 nt, synthetic construct
  source 1..33: mol_type = other RNA
tgatcccatacagaaagcttctgcatccaaaac

SEQ ID NO: 858 - RNA, 34 nt, synthetic construct
  source 1..34: mol_type = other RNA
ctgatcccatacagaaagcttctgcatccaaaac

SEQ ID NO: 859 - RNA, 35 nt, synthetic construct
  source 1..35: mol_type = other RNA
cctgatcccatacagaaagcttctgcatccaaaac

SEQ ID NO: 860 - RNA, 36 nt, synthetic construct
  source 1..36: mol_type = other RNA
gcctgatcccatacagaaagcttctgcatccaaaac

SEQ ID NO: 861 - RNA, 37 nt, synthetic construct
  source 1..37: mol_type = other RNA
agcctgatcccatacagaaagcttctgcatccaaaac

SEQ ID NO: 862 - RNA, 38 nt, synthetic construct
  source 1..38: mol_type = other RNA
aagcctgatcccatacagaaagcttctgcatccaaaac

SEQ ID NO: 863 - RNA, 39 nt, synthetic construct
  source 1..39: mol_type = other RNA
gaagcctgatcccatacagaaagcttctgcatccaaaac

SEQ ID NO: 864 - RNA, 40 nt, synthetic construct
  source 1..40: mol_type = other RNA
ggaagcctgatcccatacagaaagcttctgcatccaaaac

SEQ ID NO: 865 - RNA, 17 nt, synthetic construct
  source 1..17: mol_type = other RNA
gcagaagctttctgtat

SEQ ID NO: 866 - RNA, 18 nt, synthetic construct
  source 1..18: mol_type = other RNA
tgcagaagctttctgtat

SEQ ID NO: 867 - RNA, 19 nt, synthetic construct
  source 1..19: mol_type = other RNA
atgcagaagctttctgtat

SEQ ID NO: 868 - RNA, 21 nt, synthetic construct
  source 1..21: mol_type = other RNA
ggatgcagaagctttctgtat

SEQ ID NO: 869 - RNA, 22 nt, synthetic construct
  source 1..22: mol_type = other RNA
tggatgcagaagctttctgtat

SEQ ID NO: 870-874 - skipped (5 entries)

SEQ ID NO: 875 - RNA, 10 nt, synthetic construct
  source 1..10: mol_type = other RNA
cagaaagctt

SEQ ID NO: 876 - RNA, 11 nt, synthetic construct
  source 1..11: mol_type = other RNA
cagaaagcttc

SEQ ID NO: 877 - RNA, 12 nt, synthetic construct
  source 1..12: mol_type = other RNA
cagaaagcttct

SEQ ID NO: 878 - RNA, 13 nt, synthetic construct
  source 1..13: mol_type = other RNA
cagaaagcttctg

SEQ ID NO: 879 - RNA, 14 nt, synthetic construct
  source 1..14: mol_type = other RNA
cagaaagcttctgc

SEQ ID NO: 880 - RNA, 15 nt, synthetic construct
  source 1..15: mol_type = other RNA
cagaaagcttctgca

SEQ ID NO: 881 - RNA, 16 nt, synthetic construct
  source 1..16: mol_type = other RNA
cagaaagcttctgcat

SEQ ID NO: 882 - RNA, 17 nt, synthetic construct
  source 1..17: mol_type = other RNA
cagaaagcttctgcatc

SEQ ID NO: 883 - RNA, 18 nt, synthetic construct
  source 1..18: mol_type = other RNA
cagaaagcttctgcatcc

SEQ ID NO: 884 - RNA, 19 nt, synthetic construct
  source 1..19: mol_type = other RNA
cagaaagcttctgcatcca

SEQ ID NO: 885 - RNA, 10 nt, synthetic construct
  source 1..10: mol_type = other RNA
tgatcccata

SEQ ID NO: 886 - RNA, 11 nt, synthetic construct
  source 1..11: mol_type = other RNA
ctgatcccata

SEQ ID NO: 887 - RNA, 12 nt, synthetic construct
  source 1..12: mol_type = other RNA
cctgatcccata

SEQ ID NO: 888 - RNA, 13 nt, synthetic construct
  source 1..13: mol_type = other RNA
gcctgatcccata

SEQ ID NO: 889 - RNA, 14 nt, synthetic construct
  source 1..14: mol_type = other RNA
agcctgatcccata

SEQ ID NO: 890 - RNA, 15 nt, synthetic construct
  source 1..15: mol_type = other RNA
aagcctgatcccata

SEQ ID NO: 891 - RNA, 16 nt, synthetic construct
  source 1..16: mol_type = other RNA
gaagcctgatcccata

SEQ ID NO: 892 - RNA, 17 nt, synthetic construct
  source 1..17: mol_type = other RNA
ggaagcctgatcccata

SEQ ID NO: 893 - RNA, 18 nt, synthetic construct
  source 1..18: mol_type = other RNA
tggaagcctgatcccata

SEQ ID NO: 894 - RNA, 19 nt, synthetic construct
  source 1..19: mol_type = other RNA
gtggaagcctgatcccata

SEQ ID NO: 895 - RNA, 21 nt, synthetic construct
  source 1..21: mol_type = other RNA
aagtggaagcctgatcccata

SEQ ID NO: 896 - RNA, 22 nt, synthetic construct
  source 1..22: mol_type = other RNA
aaagtggaagcctgatcccata

SEQ ID NO: 897 - RNA, 23 nt, synthetic construct
  source 1..23: mol_type = other RNA
caaagtggaagcctgatcccata

SEQ ID NO: 898 - RNA, 24 nt, synthetic construct
  source 1..24: mol_type = other RNA
ccaaagtggaagcctgatcccata

SEQ ID NO: 899 - RNA, 25 nt, synthetic construct
  source 1..25: mol_type = other RNA
tccaaagtggaagcctgatcccata

SEQ ID NO: 900 - RNA, 26 nt, synthetic construct
  source 1..26: mol_type = other RNA
ttccaaagtggaagcctgatcccata

SEQ ID NO: 901 - RNA, 27 nt, synthetic construct
  source 1..27: mol_type = other RNA
tttccaaagtggaagcctgatcccata

SEQ ID NO: 902 - RNA, 28 nt, synthetic construct
  source 1..28: mol_type = other RNA
gtttccaaagtggaagcctgatcccata

SEQ ID NO: 903 - RNA, 29 nt, synthetic construct
  source 1..29: mol_type = other RNA
ggtttccaaagtggaagcctgatcccata

SEQ ID NO: 904 - RNA, 30 nt, synthetic construct
  source 1..30: mol_type = other RNA
gggtttccaaagtggaagcctgatcccata

SEQ ID NO: 905 - RNA, 31 nt, synthetic construct
  source 1..31: mol_type = other RNA
tgggtttccaaagtggaagcctgatcccata

SEQ ID NO: 906 - RNA, 32 nt, synthetic construct
  source 1..32: mol_type = other RNA
ctgggtttccaaagtggaagcctgatcccata

SEQ ID NO: 907 - RNA, 33 nt, synthetic construct
  source 1..33: mol_type = other RNA
gctgggtttccaaagtggaagcctgatcccata

SEQ ID NO: 908 - RNA, 34 nt, synthetic construct
  source 1..34: mol_type = other RNA
tgctgggtttccaaagtggaagcctgatcccata

SEQ ID NO: 909 - RNA, 35 nt, synthetic construct
  source 1..35: mol_type = other RNA
ttgctgggtttccaaagtggaagcctgatcccata

SEQ ID NO: 910 - RNA, 36 nt, synthetic construct
  source 1..36: mol_type = other RNA
cttgctgggtttccaaagtggaagcctgatcccata

SEQ ID NO: 911 - RNA, 37 nt, synthetic construct
  source 1..37: mol_type = other RNA
tcttgctgggtttccaaagtggaagcctgatcccata

SEQ ID NO: 912 - RNA, 38 nt, synthetic construct
  source 1..38: mol_type = other RNA
gtcttgctgggtttccaaagtggaagcctgatcccata

SEQ ID NO: 913 - RNA, 39 nt, synthetic construct
  source 1..39: mol_type = other RNA
tgtcttgctgggtttccaaagtggaagcctgatcccata

SEQ ID NO: 914 - RNA, 40 nt, synthetic construct
  source 1..40: mol_type = other RNA
gtgtcttgctgggtttccaaagtggaagcctgatcccata

SEQ ID NO: 915 - RNA, 17 nt, synthetic construct
  source 1..17: mol_type = other RNA
tgcagaagctttctgta

SEQ ID NO: 916 - RNA, 18 nt, synthetic construct
  source 1..18: mol_type = other RNA
atgcagaagctttctgta

SEQ ID NO: 917 - RNA, 19 nt, synthetic construct
  source 1..19: mol_type = other RNA
gatgcagaagctttctgta

SEQ ID NO: 918 - RNA, 21 nt, synthetic construct
  source 1..21: mol_type = other RNA
tggatgcagaagctttctgta

SEQ ID NO: 919 - RNA, 22 nt, synthetic construct
  source 1..22: mol_type = other RNA
ttggatgcagaagctttctgta

SEQ ID NO: 920-924 - skipped (5 entries)

SEQ ID NO: 925 - RNA, 10 nt, synthetic construct
  source 1..10: mol_type = other RNA
agaaagcttc

SEQ ID NO: 926 - RNA, 11 nt, synthetic construct
  source 1..11: mol_type = other RNA
agaaagcttct

SEQ ID NO: 927 - RNA, 12 nt, synthetic construct
  source 1..12: mol_type = other RNA
agaaagcttctg

SEQ ID NO: 928 - RNA, 13 nt, synthetic construct
  source 1..13: mol_type = other RNA
agaaagcttctgc

SEQ ID NO: 929 - RNA, 14 nt, synthetic construct
  source 1..14: mol_type = other RNA
agaaagcttctgca

SEQ ID NO: 930 - RNA, 15 nt, synthetic construct
  source 1..15: mol_type = other RNA
agaaagcttctgcat

SEQ ID NO: 931 - RNA, 16 nt, synthetic construct
  source 1..16: mol_type = other RNA
agaaagcttctgcatc

SEQ ID NO: 932 - RNA, 17 nt, synthetic construct
  source 1..17: mol_type = other RNA
agaaagcttctgcatcc

SEQ ID NO: 933 - RNA, 18 nt, synthetic construct
  source 1..18: mol_type = other RNA
agaaagcttctgcatcca

SEQ ID NO: 934 - RNA, 19 nt, synthetic construct
  source 1..19: mol_type = other RNA
agaaagcttctgcatccaa

SEQ ID NO: 935 - RNA, 10 nt, synthetic construct
  source 1..10: mol_type = other RNA
gatcccatac

SEQ ID NO: 936 - RNA, 11 nt, synthetic construct
  source 1..11: mol_type = other RNA
tgatcccatac

SEQ ID NO: 937 - RNA, 12 nt, synthetic construct
  source 1..12: mol_type = other RNA
ctgatcccatac

SEQ ID NO: 938 - RNA, 13 nt, synthetic construct
  source 1..13: mol_type = other RNA
cctgatcccatac

SEQ ID NO: 939 - RNA, 14 nt, synthetic construct
  source 1..14: mol_type = other RNA
gcctgatcccatac

SEQ ID NO: 940 - RNA, 15 nt, synthetic construct
  source 1..15: mol_type = other RNA
agcctgatcccatac

SEQ ID NO: 941 - RNA, 16 nt, synthetic construct
  source 1..16: mol_type = other RNA
aagcctgatcccatac

SEQ ID NO: 942 - RNA, 17 nt, synthetic construct
  source 1..17: mol_type = other RNA
gaagcctgatcccatac

SEQ ID NO: 943 - RNA, 18 nt, synthetic construct
  source 1..18: mol_type = other RNA
ggaagcctgatcccatac

SEQ ID NO: 944 - RNA, 19 nt, synthetic construct
  source 1..19: mol_type = other RNA
tggaagcctgatcccatac

SEQ ID NO: 945 - RNA, 21 nt, synthetic construct
  source 1..21: mol_type = other RNA
agtggaagcctgatcccatac

SEQ ID NO: 946 - RNA, 22 nt, synthetic construct
  source 1..22: mol_type = other RNA
aagtggaagcctgatcccatac

SEQ ID NO: 947 - RNA, 23 nt, synthetic construct
  source 1..23: mol_type = other RNA
aaagtggaagcctgatcccatac

SEQ ID NO: 948 - RNA, 24 nt, synthetic construct
  source 1..24: mol_type = other RNA
caaagtggaagcctgatcccatac

SEQ ID NO: 949 - RNA, 25 nt, synthetic construct
  source 1..25: mol_type = other RNA
ccaaagtggaagcctgatcccatac

SEQ ID NO: 950 - RNA, 26 nt, synthetic construct
  source 1..26: mol_type = other RNA
tccaaagtggaagcctgatcccatac

SEQ ID NO: 951 - RNA, 27 nt, synthetic construct
  source 1..27: mol_type = other RNA
ttccaaagtggaagcctgatcccatac

SEQ ID NO: 952 - RNA, 28 nt, synthetic construct
  source 1..28: mol_type = other RNA
tttccaaagtggaagcctgatcccatac

SEQ ID NO: 953 - RNA, 29 nt, synthetic construct
  source 1..29: mol_type = other RNA
gtttccaaagtggaagcctgatcccatac

SEQ ID NO: 954 - RNA, 30 nt, synthetic construct
  source 1..30: mol_type = other RNA
ggtttccaaagtggaagcctgatcccatac

SEQ ID NO: 955 - RNA, 31 nt, synthetic construct
  source 1..31: mol_type = other RNA
gggtttccaaagtggaagcctgatcccatac

SEQ ID NO: 956 - RNA, 32 nt, synthetic construct
  source 1..32: mol_type = other RNA
tgggtttccaaagtggaagcctgatcccatac

SEQ ID NO: 957 - RNA, 33 nt, synthetic construct
  source 1..33: mol_type = other RNA
ctgggtttccaaagtggaagcctgatcccatac

SEQ ID NO: 958 - RNA, 34 nt, synthetic construct
  source 1..34: mol_type = other RNA
gctgggtttccaaagtggaagcctgatcccatac

SEQ ID NO: 959 - RNA, 35 nt, synthetic construct
  source 1..35: mol_type = other RNA
tgctgggtttccaaagtggaagcctgatcccatac

SEQ ID NO: 960 - RNA, 36 nt, synthetic construct
  source 1..36: mol_type = other RNA
ttgctgggtttccaaagtggaagcctgatcccatac

SEQ ID NO: 961 - RNA, 37 nt, synthetic construct
  source 1..37: mol_type = other RNA
cttgctgggtttccaaagtggaagcctgatcccatac

SEQ ID NO: 962 - RNA, 38 nt, synthetic construct
  source 1..38: mol_type = other RNA
tcttgctgggtttccaaagtggaagcctgatcccatac

SEQ ID NO: 963 - RNA, 39 nt, synthetic construct
  source 1..39: mol_type = other RNA
gtcttgctgggtttccaaagtggaagcctgatcccatac

SEQ ID NO: 964 - RNA, 40 nt, synthetic construct
  source 1..40: mol_type = other RNA
tgtcttgctgggtttccaaagtggaagcctgatcccatac

SEQ ID NO: 965 - RNA, 115 nt, synthetic construct
  source 1..115: mol_type = other RNA
ggatgcagaagctttctgtagttttagagctagaaatagcaagttaaaataaggctagtccgttatcaacttgaaaaagtggcaccgagtcggtgctgatcccatacagaaagct

SEQ ID NO: 966 - RNA, 117 nt, synthetic construct
  source 1..117: mol_type = other RNA
ggatgcagaagctttctgtagttttagagctagaaatagcaagttaaaataaggctagtccgttatcaacttgaaaaagtggcaccgagtcggtgctgatcccatacagaaagcttc

SEQ ID NO: 967 - RNA, 118 nt, synthetic construct
  source 1..118: mol_type = other RNA
ggatgcagaagctttctgtagttttagagctagaaatagcaagttaaaataaggctagtccgttatcaacttgaaaaagtggcaccgagtcggtgcgcctgatcccatacagaaagct

SEQ ID NO: 968 - RNA, 119 nt, synthetic construct
  source 1..119: mol_type = other RNA
ggatgcagaagctttctgtagttttagagctagaaatagcaagttaaaataaggctagtccgttatcaacttgaaaaagtggcaccgagtcggtgctgatcccatacagaaagcttctg

SEQ ID NO: 969 - RNA, 119 nt, synthetic construct
  source 1..119: mol_type = other RNA
ggatgcagaagctttctgtagttttagagctagaaatagcaagttaaaataaggctagtccgttatcaacttgaaaaagtggcaccgagtcggtgctgatcccatacagaaagcttttt

SEQ ID NO: 970 - RNA, 120 nt, synthetic construct
  source 1..120: mol_type = other RNA
ggatgcagaagctttctgtagttttagagctagaaatagcaagttaaaataaggctagtccgttatcaacttgaaaaagtggcaccgagtcggtgcgcctgatcccatacagaaagcttc

SEQ ID NO: 971 - RNA, 120 nt, synthetic construct
  source 1..120: mol_type = other RNA
ggatgcagaagctttctgtagttttagagctagaaatagcaagttaaaataaggctagtccgttatcaacttgaaaaagtggcaccgagtcggtgcaagcctgatcccatacagaaagct

SEQ ID NO: 972 - RNA, 121 nt, synthetic construct
  source 1..121: mol_type = other RNA
ggatgcagaagctttctgtagttttagagctagaaatagcaagttaaaataaggctagtccgttatcaacttgaaaaagtggcaccgagtcggtgctgatcccatacagaaagcttctgca

SEQ ID NO: 973 - RNA, 121 nt, synthetic construct
  source 1..121: mol_type = other RNA
ggatgcagaagctttctgtagttttagagctagaaatagcaagttaaaataaggctagtccgttatcaacttgaaaaagtggcaccgagtcggtgctgatcccatacagaaagcttctttt

SEQ ID NO: 974 - RNA, 122 nt, synthetic construct
  source 1..122: mol_type = other RNA
ggatgcagaagctttctgtagttttagagctagaaatagcaagttaaaataaggctagtccgttatcaacttgaaaaagtggcaccgagtcggtgcgcctgatcccatacagaaagcttctg

SEQ ID NO: 975 - RNA, 122 nt, synthetic construct
  source 1..122: mol_type = other RNA
ggatgcagaagctttctgtagttttagagctagaaatagcaagttaaaataaggctagtccgttatcaacttgaaaaagtggcaccgagtcggtgcaagcctgatcccatacagaaagcttc

SEQ ID NO: 976 - RNA, 122 nt, synthetic construct
  source 1..122: mol_type = other RNA
ggatgcagaagctttctgtagttttagagctagaaatagcaagttaaaataaggctagtccgttatcaacttgaaaaagtggcaccgagtcggtgcggaagcctgatcccatacagaaagct

SEQ ID NO: 977 - RNA, 122 nt, synthetic construct
  source 1..122: mol_type = other RNA
ggatgcagaagctttctgtagttttagagctagaaatagcaagttaaaataaggctagtccgttatcaacttgaaaaagtggcaccgagtcggtgcgcctgatcccatacagaaagcttttt

SEQ ID NO: 978 - RNA, 123 nt, synthetic construct
  source 1..123: mol_type = other RNA
ggatgcagaagctttctgtagttttagagctagaaatagcaagttaaaataaggctagtccgttatcaacttgaaaaagtggcaccgagtcggtgctgatcccatacagaaagcttctgtttt

SEQ ID NO: 979 - RNA, 124 nt, synthetic construct
  source 1..124: mol_type = other RNA
ggatgcagaagctttctgtagttttagagctagaaatagcaagttaaaataaggctagtccgttatcaacttgaaaaagtggcaccgagtcggtgcgcctgatcccatacagaaagcttctgca

SEQ ID NO: 980 - RNA, 124 nt, synthetic construct
  source 1..124: mol_type = other RNA
ggatgcagaagctttctgtagttttagagctagaaatagcaagttaaaataaggctagtccgttatcaacttgaaaaagtggcaccgagtcggtgcaagcctgatcccatacagaaagcttctg

SEQ ID NO: 981 - RNA, 124 nt, synthetic construct
  source 1..124: mol_type = other RNA
ggatgcagaagctttctgtagttttagagctagaaatagcaagttaaaataaggctagtccgttatcaacttgaaaaagtggcaccgagtcggtgcggaagcctgatcccatacagaaagcttc

SEQ ID NO: 982 - RNA, 124 nt, synthetic construct
  source 1..124: mol_type = other RNA
ggatgcagaagctttctgtagttttagagctagaaatagcaagttaaaataaggctagtccgttatcaacttgaaaaagtggcaccgagtcggtgcgtggaagcctgatcccatacagaaagct

SEQ ID NO: 983 - RNA, 124 nt, synthetic construct
  source 1..124: mol_type = other RNA
ggatgcagaagctttctgtagttttagagctagaaatagcaagttaaaataaggctagtccgttatcaacttgaaaaagtggcaccgagtcggtgcgcctgatcccatacagaaagcttctttt

SEQ ID NO: 984 - RNA, 124 nt, synthetic construct
  source 1..124: mol_type = other RNA
ggatgcagaagctttctgtagttttagagctagaaatagcaagttaaaataaggctagtccgttatcaacttgaaaaagtggcaccgagtcggtgcaagcctgatcccatacagaaagcttttt

SEQ ID NO: 985 - RNA, 125 nt, synthetic construct
  source 1..125: mol_type = other RNA
ggatgcagaagctttctgtagttttagagctagaaatagcaagttaaaataaggctagtccgttatcaacttgaaaaagtggcaccgagtcggtgctgatcccatacagaaagcttctgcatttt

SEQ ID NO: 986 - RNA, 126 nt, synthetic construct
  source 1..126: mol_type = other RNA
ggatgcagaagctttctgtagttttagagctagaaatagcaagttaaaataaggctagtccgttatcaacttgaaaaagtggcaccgagtcggtgcaagcctgatcccatacagaaagcttctgca

SEQ ID NO: 987 - RNA, 126 nt, synthetic construct
  source 1..126: mol_type = other RNA
ggatgcagaagctttctgtagttttagagctagaaatagcaagttaaaataaggctagtccgttatcaacttgaaaaagtggcaccgagtcggtgcggaagcctgatcccatacagaaagcttctg

SEQ ID NO: 988 - RNA, 126 nt, synthetic construct
  source 1..126: mol_type = other RNA
ggatgcagaagctttctgtagttttagagctagaaatagcaagttaaaataaggctagtccgttatcaacttgaaaaagtggcaccgagtcggtgcgtggaagcctgatcccatacagaaagcttc

SEQ ID NO: 989 - RNA, 126 nt, synthetic construct
  source 1..126: mol_type = other RNA
ggatgcagaagctttctgtagttttagagctagaaatagcaagttaaaataaggctagtccgttatcaacttgaaaaagtggcaccgagtcggtgcgcctgatcccatacagaaagcttctgtttt

SEQ ID NO: 990 - RNA, 126 nt, synthetic construct
  source 1..126: mol_type = other RNA
ggatgcagaagctttctgtagttttagagctagaaatagcaagttaaaataaggctagtccgttatcaacttgaaaaagtggcaccgagtcggtgcaagcctgatcccatacagaaagcttctttt

SEQ ID NO: 991 - RNA, 126 nt, synthetic construct
  source 1..126: mol_type = other RNA
ggatgcagaagctttctgtagttttagagctagaaatagcaagttaaaataaggctagtccgttatcaacttgaaaaagtggcaccgagtcggtgcggaagcctgatcccatacagaaagcttttt

SEQ ID NO: 992 - RNA, 128 nt, synthetic construct
  source 1..128: mol_type = other RNA
ggatgcagaagctttctgtagttttagagctagaaatagcaagttaaaataaggctagtccgttatcaacttgaaaaagtggcaccgagtcggtgcggaagcctgatcccatacagaaagcttctgca

SEQ ID NO: 993 - RNA, 128 nt, synthetic construct
  source 1..128: mol_type = other RNA
ggatgcagaagctttctgtagttttagagctagaaatagcaagttaaaataaggctagtccgttatcaacttgaaaaagtggcaccgagtcggtgcgtggaagcctgatcccatacagaaagcttctg

SEQ ID NO: 994 - RNA, 128 nt, synthetic construct
  source 1..128: mol_type = other RNA
ggatgcagaagctttctgtagttttagagctagaaatagcaagttaaaataaggctagtccgttatcaacttgaaaaagtggcaccgagtcggtgcgcctgatcccatacagaaagcttctgcatttt

SEQ ID NO: 995 - RNA, 128 nt, synthetic construct
  source 1..128: mol_type = other RNA
ggatgcagaagctttctgtagttttagagctagaaatagcaagttaaaataaggctagtccgttatcaacttgaaaaagtggcaccgagtcggtgcaagcctgatcccatacagaaagcttctgtttt

SEQ ID NO: 996 - RNA, 128 nt, synthetic construct
  source 1..128: mol_type = other RNA
ggatgcagaagctttctgtagttttagagctagaaatagcaagttaaaataaggctagtccgttatcaacttgaaaaagtggcaccgagtcggtgcggaagcctgatcccatacagaaagcttctttt

SEQ ID NO: 997 - RNA, 128 nt, synthetic construct
  source 1..128: mol_type = other RNA
ggatgcagaagctttctgtagttttagagctagaaatagcaagttaaaataaggctagtccgttatcaacttgaaaaagtggcaccgagtcggtgcgtggaagcctgatcccatacagaaagcttttt

SEQ ID NO: 998 - RNA, 130 nt, synthetic construct
  source 1..130: mol_type = other RNA
ggatgcagaagctttctgtagttttagagctagaaatagcaagttaaaataaggctagtccgttatcaacttgaaaaagtggcaccgagtcggtgcgtggaagcctgatcccatacagaaagcttctgca

SEQ ID NO: 999 - RNA, 130 nt, synthetic construct
  source 1..130: mol_type = other RNA
ggatgcagaagctttctgtagttttagagctagaaatagcaagttaaaataaggctagtccgttatcaacttgaaaaagtggcaccgagtcggtgcaagcctgatcccatacagaaagcttctgcatttt

SEQ ID NO: 1000 - RNA, 130 nt, synthetic construct
  source 1..130: mol_type = other RNA
ggatgcagaagctttctgtagttttagagctagaaatagcaagttaaaataaggctagtccgttatcaacttgaaaaagtggcaccgagtcggtgcggaagcctgatcccatacagaaagcttctgtttt

SEQ ID NO: 1001 - RNA, 130 nt, synthetic construct
  source 1..130: mol_type = other RNA
ggatgcagaagctttctgtagttttagagctagaaatagcaagttaaaataaggctagtccgttatcaacttgaaaaagtggcaccgagtcggtgcgtggaagcctgatcccatacagaaagcttctttt

SEQ ID NO: 1002 - RNA, 132 nt, synthetic construct
  source 1..132: mol_type = other RNA
ggatgcagaagctttctgtagttttagagctagaaatagcaagttaaaataaggctagtccgttatcaacttgaaaaagtggcaccgagtcggtgcggaagcctgatcccatacagaaagcttctgcatttt

SEQ ID NO: 1003 - RNA, 132 nt, synthetic construct
  source 1..132: mol_type = other RNA
ggatgcagaagctttctgtagttttagagctagaaatagcaagttaaaataaggctagtccgttatcaacttgaaaaagtggcaccgagtcggtgcgtggaagcctgatcccatacagaaagcttctgtttt

SEQ ID NO: 1004 - RNA, 134 nt, synthetic construct
  source 1..134: mol_type = other RNA
ggatgcagaagctttctgtagttttagagctagaaatagcaagttaaaataaggctagtccgttatcaacttgaaaaagtggcaccgagtcggtgcgtggaagcctgatcccatacagaaagcttctgcatttt

SEQ ID NO: 1005 - RNA, 149 nt, synthetic construct
  source 1..149: mol_type = other RNA
ggatgcagaagctttctgtagttttagagctagaaatagcaagttaaaataaggctagtccgttatcaacttgaaaaagtggcaccgagtcggtgctgatcccatacagaaagctaacattgacgcgtctctacgtgggggcgcgtttt

SEQ ID NO: 1006 - RNA, 151 nt, synthetic construct
  source 1..151: mol_type = other RNA
ggatgcagaagctttctgtagttttagagctagaaatagcaagttaaaataaggctagtccgttatcaacttgaaaaagtggcaccgagtcggtgctgatcccatacagaaagcttcaacattgacgcgtctctacgtgggggcgcgtttt

SEQ ID NO: 1007 - RNA, 152 nt, synthetic construct
  source 1..152: mol_type = other RNA
ggatgcagaagctttctgtagttttagagctagaaatagcaagttaaaataaggctagtccgttatcaacttgaaaaagtggcaccgagtcggtgcgcctgatcccatacagaaagctaacattgacgcgtctctacgtgggggcgcgtttt

SEQ ID NO: 1008 - RNA, 153 nt, synthetic construct
  source 1..153: mol_type = other RNA
ggatgcagaagctttctgtagttttagagctagaaatagcaagttaaaataaggctagtccgttatcaacttgaaaaagtggcaccgagtcggtgctgatcccatacagaaagcttctgaacattgacgcgtctctacgtgggggcgcgtttt

SEQ ID NO: 1009 - RNA, 154 nt, synthetic construct
  source 1..154: mol_type = other RNA
ggatgcagaagctttctgtagttttagagctagaaatagcaagttaaaataaggctagtccgttatcaacttgaaaaagtggcaccgagtcggtgcgcctgatcccatacagaaagcttcaacattgacgcgtctctacgtgggggcgcgtttt

SEQ ID NO: 1010 - RNA, 154 nt, synthetic construct
  source 1..154: mol_type = other RNA
ggatgcagaagctttctgtagttttagagctagaaatagcaagttaaaataaggctagtccgttatcaacttgaaaaagtggcaccgagtcggtgcaagcctgatcccatacagaaagctaacattgacgcgtctctacgtgggggcgcgtttt

SEQ ID NO: 1011 - RNA, 155 nt, synthetic construct
  source 1..155: mol_type = other RNA
ggatgcagaagctttctgtagttttagagctagaaatagcaagttaaaataaggctagtccgttatcaacttgaaaaagtggcaccgagtcggtgctgatcccatacagaaagcttctgcaaacattgacgcgtctctacgtgggggcgcgtttt

SEQ ID NO: 1012 - RNA, 156 nt, synthetic construct
  source 1..156: mol_type = other RNA
ggatgcagaagctttctgtagttttagagctagaaatagcaagttaaaataaggctagtccgttatcaacttgaaaaagtggcaccgagtcggtgcgcctgatcccatacagaaagcttctgaacattgacgcgtctctacgtgggggcgcgtttt

SEQ ID NO: 1013 - RNA, 156 nt, synthetic construct
  source 1..156: mol_type = other RNA
ggatgcagaagctttctgtagttttagagctagaaatagcaagttaaaataaggctagtccgttatcaacttgaaaaagtggcaccgagtcggtgcaagcctgatcccatacagaaagcttcaacattgacgcgtctctacgtgggggcgcgtttt

SEQ ID NO: 1014 - RNA, 156 nt, synthetic construct
  source 1..156: mol_type = other RNA
ggatgcagaagctttctgtagttttagagctagaaatagcaagttaaaataaggctagtccgttatcaacttgaaaaagtggcaccgagtcggtgcggaagcctgatcccatacagaaagctaacattgacgcgtctctacgtgggggcgcgtttt

SEQ ID NO: 1015 - RNA, 158 nt, synthetic construct
  source 1..158: mol_type = other RNA
ggatgcagaagctttctgtagttttagagctagaaatagcaagttaaaataaggctagtccgttatcaacttgaaaaagtggcaccgagtcggtgcgcctgatcccatacagaaagcttctgcaaacattgacgcgtctctacgtgggggcgcgtttt

SEQ ID NO: 1016 - RNA, 158 nt, synthetic construct
  source 1..158: mol_type = other RNA
ggatgcagaagctttctgtagttttagagctagaaatagcaagttaaaataaggctagtccgttatcaacttgaaaaagtggcaccgagtcggtgcaagcctgatcccatacagaaagcttctgaacattgacgcgtctctacgtgggggcgcgtttt

SEQ ID NO: 1017 - RNA, 158 nt, synthetic construct
  source 1..158: mol_type = other RNA
ggatgcagaagctttctgtagttttagagctagaaatagcaagttaaaataaggctagtccgttatcaacttgaaaaagtggcaccgagtcggtgcggaagcctgatcccatacagaaagcttcaacattgacgcgtctctacgtgggggcgcgtttt

SEQ ID NO: 1018 - RNA, 158 nt, synthetic construct
  source 1..158: mol_type = other RNA
ggatgcagaagctttctgtagttttagagctagaaatagcaagttaaaataaggctagtccgttatcaacttgaaaaagtggcaccgagtcggtgcgtggaagcctgatcccatacagaaagctaacattgacgcgtctctacgtgggggcgcgtttt

SEQ ID NO: 1019 - RNA, 160 nt, synthetic construct
  source 1..160: mol_type = other RNA
ggatgcagaagctttctgtagttttagagctagaaatagcaagttaaaataaggctagtccgttatcaacttgaaaaagtggcaccgagtcggtgcaagcctgatcccatacagaaagcttctgcaaacattgacgcgtctctacgtgggggcgcgtttt

SEQ ID NO: 1020 - RNA, 160 nt, synthetic construct
  source 1..160: mol_type = other RNA
ggatgcagaagctttctgtagttttagagctagaaatagcaagttaaaataaggctagtccgttatcaacttgaaaaagtggcaccgagtcggtgcggaagcctgatcccatacagaaagcttctgaacattgacgcgtctctacgtgggggcgcgtttt

SEQ ID NO: 1021 - RNA, 160 nt, synthetic construct
  source 1..160: mol_type = other RNA
ggatgcagaagctttctgtagttttagagctagaaatagcaagttaaaataaggctagtccgttatcaacttgaaaaagtggcaccgagtcggtgcgtggaagcctgatcccatacagaaagcttcaacattgacgcgtctctacgtgggggcgcgtttt

SEQ ID NO: 1022 - RNA, 162 nt, synthetic construct
  source 1..162: mol_type = other RNA
ggatgcagaagctttctgtagttttagagctagaaatagcaagttaaaataaggctagtccgttatcaacttgaaaaagtggcaccgagtcggtgcggaagcctgatcccatacagaaagcttctgcaaacattgacgcgtctctacgtgggggcgcgtttt

SEQ ID NO: 1023 - RNA, 162 nt, synthetic construct
  source 1..162: mol_type = other RNA
ggatgcagaagctttctgtagttttagagctagaaatagcaagttaaaataaggctagtccgttatcaacttgaaaaagtggcaccgagtcggtgcgtggaagcctgatcccatacagaaagcttctgaacattgacgcgtctctacgtgggggcgcgtttt

SEQ ID NO: 1024 - RNA, 164 nt, synthetic construct
  source 1..164: mol_type = other RNA
ggatgcagaagctttctgtagttttagagctagaaatagcaagttaaaataaggctagtccgttatcaacttgaaaaagtggcaccgagtcggtgcgtggaagcctgatcccatacagaaagcttctgcaaacattgacgcgtctctacgtgggggcgcgtttt

SEQ ID NO: 1025 - RNA, 17 nt, synthetic construct
  source 1..17: mol_type = other RNA
tttccaaagtggaagcc

SEQ ID NO: 1026 - RNA, 18 nt, synthetic construct
  source 1..18: mol_type = other RNA
gtttccaaagtggaagcc

SEQ ID NO: 1027 - RNA, 19 nt, synthetic construct
  source 1..19: mol_type = other RNA
ggtttccaaagtggaagcc

SEQ ID NO: 1028 - RNA, 21 nt, synthetic construct
  source 1..21: mol_type = other RNA
tgggtttccaaagtggaagcc

SEQ ID NO: 1029 - RNA, 22 nt, synthetic construct
  source 1..22: mol_type = other RNA
ctgggtttccaaagtggaagcc

SEQ ID NO: 1030-1034 - skipped (5 entries)

SEQ ID NO: 1035 - RNA, 10 nt, synthetic construct
  source 1..10: mol_type = other RNA
ttccactttg

SEQ ID NO: 1036 - RNA, 11 nt, synthetic construct
  source 1..11: mol_type = other RNA
ttccactttgg

SEQ ID NO: 1037 - RNA, 12 nt, synthetic construct
  source 1..12: mol_type = other RNA
ttccactttgga

SEQ ID NO: 1038 - RNA, 13 nt, synthetic construct
  source 1..13: mol_type = other RNA
ttccactttggaa

SEQ ID NO: 1039 - RNA, 14 nt, synthetic construct
  source 1..14: mol_type = other RNA
ttccactttggaaa

SEQ ID NO: 1040 - RNA, 15 nt, synthetic construct
  source 1..15: mol_type = other RNA
ttccactttggaaac

SEQ ID NO: 1041 - RNA, 16 nt, synthetic construct
  source 1..16: mol_type = other RNA
ttccactttggaaacc

SEQ ID NO: 1042 - RNA, 17 nt, synthetic construct
  source 1..17: mol_type = other RNA
ttccactttggaaaccc

SEQ ID NO: 1043 - RNA, 18 nt, synthetic construct
  source 1..18: mol_type = other RNA
ttccactttggaaaccca

SEQ ID NO: 1044 - RNA, 19 nt, synthetic construct
  source 1..19: mol_type = other RNA
ttccactttggaaacccag

SEQ ID NO: 1045 - RNA, 10 nt, synthetic construct
  source 1..10: mol_type = other RNA
gggaccaggc

SEQ ID NO: 1046 - RNA, 10 nt, synthetic construct
  source 1..10: mol_type = other RNA
gggatcaggc

SEQ ID NO: 1047 - RNA, 11 nt, synthetic construct
  source 1..11: mol_type = other RNA
tgggaccaggc

SEQ ID NO: 1048 - RNA, 11 nt, synthetic construct
  source 1..11: mol_type = other RNA
tgggatcaggc

SEQ ID NO: 1049 - RNA, 12 nt, synthetic construct
  source 1..12: mol_type = other RNA
atgggaccaggc

SEQ ID NO: 1050 - RNA, 12 nt, synthetic construct
  source 1..12: mol_type = other RNA
atgggatcaggc

SEQ ID NO: 1051 - RNA, 13 nt, synthetic construct
  source 1..13: mol_type = other RNA
tatgggaccaggc

SEQ ID NO: 1052 - RNA, 13 nt, synthetic construct
  source 1..13: mol_type = other RNA
tatgggatcaggc

SEQ ID NO: 1053 - RNA, 14 nt, synthetic construct
  source 1..14: mol_type = other RNA
gtatgggaccaggc

SEQ ID NO: 1054 - RNA, 14 nt, synthetic construct
  source 1..14: mol_type = other RNA
gtatgggatcaggc

SEQ ID NO: 1055 - RNA, 15 nt, synthetic construct
  source 1..15: mol_type = other RNA
tgtatgggaccaggc

SEQ ID NO: 1056 - RNA, 15 nt, synthetic construct
  source 1..15: mol_type = other RNA
tgtatgggatcaggc

SEQ ID NO: 1057 - RNA, 16 nt, synthetic construct
  source 1..16: mol_type = other RNA
ctgtatgggaccaggc

SEQ ID NO: 1058 - RNA, 16 nt, synthetic construct
  source 1..16: mol_type = other RNA
ctgtatgggatcaggc

SEQ ID NO: 1059 - RNA, 17 nt, synthetic construct
  source 1..17: mol_type = other RNA
tctgtatgggaccaggc

SEQ ID NO: 1060 - RNA, 17 nt, synthetic construct
  source 1..17: mol_type = other RNA
tctgtatgggatcaggc

SEQ ID NO: 1061 - RNA, 18 nt, synthetic construct
  source 1..18: mol_type = other RNA
ttctgtatgggaccaggc

SEQ ID NO: 1062 - RNA, 18 nt, synthetic construct
  source 1..18: mol_type = other RNA
ttctgtatgggatcaggc

SEQ ID NO: 1063 - RNA, 19 nt, synthetic construct
  source 1..19: mol_type = other RNA
tttctgtatgggaccaggc

SEQ ID NO: 1064 - RNA, 19 nt, synthetic construct
  source 1..19: mol_type = other RNA
tttctgtatgggatcaggc

SEQ ID NO: 1065 - RNA, 20 nt, synthetic construct
  source 1..20: mol_type = other RNA
ctttctgtatgggaccaggc

SEQ ID NO: 1066 - RNA, 20 nt, synthetic construct
  source 1..20: mol_type = other RNA
ctttctgtatgggatcaggc

SEQ ID NO: 1067 - RNA, 21 nt, synthetic construct
  source 1..21: mol_type = other RNA
gctttctgtatgggaccaggc

SEQ ID NO: 1068 - RNA, 21 nt, synthetic construct
  source 1..21: mol_type = other RNA
gctttctgtatgggatcaggc

SEQ ID NO: 1069 - RNA, 22 nt, synthetic construct
  source 1..22: mol_type = other RNA
agctttctgtatgggaccaggc

SEQ ID NO: 1070 - RNA, 22 nt, synthetic construct
  source 1..22: mol_type = other RNA
agctttctgtatgggatcaggc

SEQ ID NO: 1071 - RNA, 23 nt, synthetic construct
  source 1..23: mol_type = other RNA
aagctttctgtatgggaccaggc

SEQ ID NO: 1072 - RNA, 23 nt, synthetic construct
  source 1..23: mol_type = other RNA
aagctttctgtatgggatcaggc

SEQ ID NO: 1073 - RNA, 24 nt, synthetic construct
  source 1..24: mol_type = other RNA
gaagctttctgtatgggaccaggc

SEQ ID NO: 1074 - RNA, 24 nt, synthetic construct
  source 1..24: mol_type = other RNA
gaagctttctgtatgggatcaggc

SEQ ID NO: 1075 - RNA, 25 nt, synthetic construct
  source 1..25: mol_type = other RNA
agaagctttctgtatgggaccaggc

SEQ ID NO: 1076 - RNA, 25 nt, synthetic construct
  source 1..25: mol_type = other RNA
agaagctttctgtatgggatcaggc

SEQ ID NO: 1077 - RNA, 26 nt, synthetic construct
  source 1..26: mol_type = other RNA
cagaagctttctgtatgggaccaggc

SEQ ID NO: 1078 - RNA, 26 nt, synthetic construct
  source 1..26: mol_type = other RNA
cagaagctttctgtatgggatcaggc

SEQ ID NO: 1079 - RNA, 27 nt, synthetic construct
  source 1..27: mol_type = other RNA
gcagaagctttctgtatgggaccaggc

SEQ ID NO: 1080 - RNA, 27 nt, synthetic construct
  source 1..27: mol_type = other RNA
gcagaagctttctgtatgggatcaggc

SEQ ID NO: 1081 - RNA, 28 nt, synthetic construct
  source 1..28: mol_type = other RNA
tgcagaagctttctgtatgggaccaggc

SEQ ID NO: 1082 - RNA, 28 nt, synthetic construct
  source 1..28: mol_type = other RNA
tgcagaagctttctgtatgggatcaggc

SEQ ID NO: 1083 - RNA, 29 nt, synthetic construct
  source 1..29: mol_type = other RNA
atgcagaagctttctgtatgggaccaggc

SEQ ID NO: 1084 - RNA, 29 nt, synthetic construct
  source 1..29: mol_type = other RNA
atgcagaagctttctgtatgggatcaggc

SEQ ID NO: 1085 - RNA, 30 nt, synthetic construct
  source 1..30: mol_type = other RNA
gatgcagaagctttctgtatgggaccaggc

SEQ ID NO: 1086 - RNA, 30 nt, synthetic construct
  source 1..30: mol_type = other RNA
gatgcagaagctttctgtatgggatcaggc

SEQ ID NO: 1087 - RNA, 31 nt, synthetic construct
  source 1..31: mol_type = other RNA
ggatgcagaagctttctgtatgggaccaggc

SEQ ID NO: 1088 - RNA, 31 nt, synthetic construct
  source 1..31: mol_type = other RNA
ggatgcagaagctttctgtatgggatcaggc

SEQ ID NO: 1089 - RNA, 32 nt, synthetic construct
  source 1..32: mol_type = other RNA
tggatgcagaagctttctgtatgggaccaggc

SEQ ID NO: 1090 - RNA, 32 nt, synthetic construct
  source 1..32: mol_type = other RNA
tggatgcagaagctttctgtatgggatcaggc

SEQ ID NO: 1091 - RNA, 33 nt, synthetic construct
  source 1..33: mol_type = other RNA
ttggatgcagaagctttctgtatgggaccaggc

SEQ ID NO: 1092 - RNA, 33 nt, synthetic construct
  source 1..33: mol_type = other RNA
ttggatgcagaagctttctgtatgggatcaggc

SEQ ID NO: 1093 - RNA, 34 nt, synthetic construct
  source 1..34: mol_type = other RNA
tttggatgcagaagctttctgtatgggaccaggc

SEQ ID NO: 1094 - RNA, 34 nt, synthetic construct
  source 1..34: mol_type = other RNA
tttggatgcagaagctttctgtatgggatcaggc

SEQ ID NO: 1095 - RNA, 35 nt, synthetic construct
  source 1..35: mol_type = other RNA
ttttggatgcagaagctttctgtatgggaccaggc

SEQ ID NO: 1096 - RNA, 35 nt, synthetic construct
  source 1..35: mol_type = other RNA
ttttggatgcagaagctttctgtatgggatcaggc

SEQ ID NO: 1097 - RNA, 36 nt, synthetic construct
  source 1..36: mol_type = other RNA
gttttggatgcagaagctttctgtatgggaccaggc

SEQ ID NO: 1098 - RNA, 36 nt, synthetic construct
  source 1..36: mol_type = other RNA
gttttggatgcagaagctttctgtatgggatcaggc

SEQ ID NO: 1099 - RNA, 37 nt, synthetic construct
  source 1..37: mol_type = other RNA
agttttggatgcagaagctttctgtatgggaccaggc

SEQ ID NO: 1100 - RNA, 37 nt, synthetic construct
  source 1..37: mol_type = other RNA
agttttggatgcagaagctttctgtatgggatcaggc

SEQ ID NO: 1101 - RNA, 38 nt, synthetic construct
  source 1..38: mol_type = other RNA
cagttttggatgcagaagctttctgtatgggaccaggc

SEQ ID NO: 1102 - RNA, 38 nt, synthetic construct
  source 1..38: mol_type = other RNA
cagttttggatgcagaagctttctgtatgggatcaggc

SEQ ID NO: 1103 - RNA, 39 nt, synthetic construct
  source 1..39: mol_type = other RNA
tcagttttggatgcagaagctttctgtatgggaccaggc

SEQ ID NO: 1104 - RNA, 39 nt, synthetic construct
  source 1..39: mol_type = other RNA
tcagttttggatgcagaagctttctgtatgggatcaggc

SEQ ID NO: 1105 - RNA, 40 nt, synthetic construct
  source 1..40: mol_type = other RNA
atcagttttggatgcagaagctttctgtatgggaccaggc

SEQ ID NO: 1106 - RNA, 40 nt, synthetic construct
  source 1..40: mol_type = other RNA
atcagttttggatgcagaagctttctgtatgggatcaggc

SEQ ID NO: 1107 - RNA, 20 nt, synthetic construct
  source 1..20: mol_type = other RNA
atttccttcagtgctggaca

SEQ ID NO: 1108 - RNA, 20 nt, synthetic construct
  source 1..20: mol_type = other RNA
cagtgctggacaggctgctg

SEQ ID NO: 1109 - RNA, 20 nt, synthetic construct
  source 1..20: mol_type = other RNA
catttccttcagtgctggac

SEQ ID NO: 1110 - RNA, 20 nt, synthetic construct
  source 1..20: mol_type = other RNA
ctggacaggctgctgtgaag

SEQ ID NO: 1111 - RNA, 20 nt, synthetic construct
  source 1..20: mol_type = other RNA
gctggacaggctgctgtgaa

SEQ ID NO: 1112 - RNA, 20 nt, synthetic construct
  source 1..20: mol_type = other RNA
tccttcagtgctggacaggc

SEQ ID NO: 1113 - RNA, 20 nt, synthetic construct
  source 1..20: mol_type = other RNA
tgctggacaggctgctgtga

SEQ ID NO: 1114 - RNA, 20 nt, synthetic construct
  source 1..20: mol_type = other RNA
ttcagtgctggacaggctgc

SEQ ID NO: 1115 - RNA, 17 nt, synthetic construct
  source 1..17: mol_type = other RNA
gtcttgctgggtttcca

SEQ ID NO: 1116 - RNA, 18 nt, synthetic construct
  source 1..18: mol_type = other RNA
tgtcttgctgggtttcca

SEQ ID NO: 1117 - RNA, 19 nt, synthetic construct
  source 1..19: mol_type = other RNA
gtgtcttgctgggtttcca

SEQ ID NO: 1118 - RNA, 21 nt, synthetic construct
  source 1..21: mol_type = other RNA
aggtgtcttgctgggtttcca

SEQ ID NO: 1119 - RNA, 22 nt, synthetic construct
  source 1..22: mol_type = other RNA
caggtgtcttgctgggtttcca

SEQ ID NO: 1120-1124 - skipped (5 entries)

SEQ ID NO: 1125 - RNA, 10 nt, synthetic construct
  source 1..10: mol_type = other RNA
aaacccagca

SEQ ID NO: 1126 - RNA, 11 nt, synthetic construct
  source 1..11: mol_type = other RNA
aaacccagcaa

SEQ ID NO: 1127 - RNA, 12 nt, synthetic construct
  source 1..12: mol_type = other RNA
aaacccagcaag

SEQ ID NO: 1128 - RNA, 13 nt, synthetic construct
  source 1..13: mol_type = other RNA
aaacccagcaaga

SEQ ID NO: 1129 - RNA, 14 nt, synthetic construct
  source 1..14: mol_type = other RNA
aaacccagcaagac

SEQ ID NO: 1130 - RNA, 15 nt, synthetic construct
  source 1..15: mol_type = other RNA
aaacccagcaagaca

SEQ ID NO: 1131 - RNA, 16 nt, synthetic construct
  source 1..16: mol_type = other RNA
aaacccagcaagacac

SEQ ID NO: 1132 - RNA, 17 nt, synthetic construct
  source 1..17: mol_type = other RNA
aaacccagcaagacacc

SEQ ID NO: 1133 - RNA, 18 nt, synthetic construct
  source 1..18: mol_type = other RNA
aaacccagcaagacacct

SEQ ID NO: 1134 - RNA, 19 nt, synthetic construct
  source 1..19: mol_type = other RNA
aaacccagcaagacacctg

SEQ ID NO: 1135 - RNA, 19 nt, synthetic construct
  source 1..19: mol_type = other RNA
gatcaggcttccacattgg

SEQ ID NO: 1136 - RNA, 19 nt, synthetic construct
  source 1..19: mol_type = other RNA
gatcaggcttccaccttgg

SEQ ID NO: 1137 - RNA, 19 nt, synthetic construct
  source 1..19: mol_type = other RNA
gatcaggcttccacgttgg

SEQ ID NO: 1138 - RNA, 19 nt, synthetic construct
  source 1..19: mol_type = other RNA
gatcaggcttccactttgg

SEQ ID NO: 1139 - RNA, 20 nt, synthetic construct
  source 1..20: mol_type = other RNA
ggatcaggcttccacattgg

SEQ ID NO: 1140 - RNA, 20 nt, synthetic construct
  source 1..20: mol_type = other RNA
ggatcaggcttccaccttgg

SEQ ID NO: 1141 - RNA, 20 nt, synthetic construct
  source 1..20: mol_type = other RNA
ggatcaggcttccacgttgg

SEQ ID NO: 1142 - RNA, 20 nt, synthetic construct
  source 1..20: mol_type = other RNA
ggatcaggcttccactttgg

SEQ ID NO: 1143 - RNA, 21 nt, synthetic construct
  source 1..21: mol_type = other RNA
gggatcaggcttccacattgg

SEQ ID NO: 1144 - RNA, 21 nt, synthetic construct
  source 1..21: mol_type = other RNA
gggatcaggcttccaccttgg

SEQ ID NO: 1145 - RNA, 21 nt, synthetic construct
  source 1..21: mol_type = other RNA
gggatcaggcttccacgttgg

SEQ ID NO: 1146 - RNA, 21 nt, synthetic construct
  source 1..21: mol_type = other RNA
gggatcaggcttccactttgg

SEQ ID NO: 1147 - RNA, 22 nt, synthetic construct
  source 1..22: mol_type = other RNA
tgggatcaggcttccacattgg

SEQ ID NO: 1148 - RNA, 22 nt, synthetic construct
  source 1..22: mol_type = other RNA
tgggatcaggcttccaccttgg

SEQ ID NO: 1149 - RNA, 22 nt, synthetic construct
  source 1..22: mol_type = other RNA
tgggatcaggcttccacgttgg

SEQ ID NO: 1150 - RNA, 22 nt, synthetic construct
  source 1..22: mol_type = other RNA
tgggatcaggcttccactttgg

SEQ ID NO: 1151 - RNA, 23 nt, synthetic construct
  source 1..23: mol_type = other RNA
atgggatcaggcttccacattgg

SEQ ID NO: 1152 - RNA, 23 nt, synthetic construct
  source 1..23: mol_type = other RNA
atgggatcaggcttccaccttgg

SEQ ID NO: 1153 - RNA, 23 nt, synthetic construct
  source 1..23: mol_type = other RNA
atgggatcaggcttccacgttgg

SEQ ID NO: 1154 - RNA, 23 nt, synthetic construct
  source 1..23: mol_type = other RNA
atgggatcaggcttccactttgg

SEQ ID NO: 1155 - RNA, 24 nt, synthetic construct
  source 1..24: mol_type = other RNA
tatgggatcaggcttccacattgg

SEQ ID NO: 1156 - RNA, 24 nt, synthetic construct
  source 1..24: mol_type = other RNA
tatgggatcaggcttccaccttgg

SEQ ID NO: 1157 - RNA, 24 nt, synthetic construct
  source 1..24: mol_type = other RNA
tatgggatcaggcttccacgttgg

SEQ ID NO: 1158 - RNA, 24 nt, synthetic construct
  source 1..24: mol_type = other RNA
tatgggatcaggcttccactttgg

SEQ ID NO: 1159 - RNA, 25 nt, synthetic construct
  source 1..25: mol_type = other RNA
gtatgggatcaggcttccacattgg

SEQ ID NO: 1160 - RNA, 25 nt, synthetic construct
  source 1..25: mol_type = other RNA
gtatgggatcaggcttccaccttgg

SEQ ID NO: 1161 - RNA, 25 nt, synthetic construct
  source 1..25: mol_type = other RNA
gtatgggatcaggcttccacgttgg

SEQ ID NO: 1162 - RNA, 25 nt, synthetic construct
  source 1..25: mol_type = other RNA
gtatgggatcaggcttccactttgg

SEQ ID NO: 1163 - RNA, 26 nt, synthetic construct
  source 1..26: mol_type = other RNA
tgtatgggatcaggcttccacattgg

SEQ ID NO: 1164 - RNA, 26 nt, synthetic construct
  source 1..26: mol_type = other RNA
tgtatgggatcaggcttccaccttgg

SEQ ID NO: 1165 - RNA, 26 nt, synthetic construct
  source 1..26: mol_type = other RNA
tgtatgggatcaggcttccacgttgg

SEQ ID NO: 1166 - RNA, 26 nt, synthetic construct
  source 1..26: mol_type = other RNA
tgtatgggatcaggcttccactttgg

SEQ ID NO: 1167 - RNA, 27 nt, synthetic construct
  source 1..27: mol_type = other RNA
ctgtatgggatcaggcttccacattgg

SEQ ID NO: 1168 - RNA, 27 nt, synthetic construct
  source 1..27: mol_type = other RNA
ctgtatgggatcaggcttccaccttgg

SEQ ID NO: 1169 - RNA, 27 nt, synthetic construct
  source 1..27: mol_type = other RNA
ctgtatgggatcaggcttccacgttgg

SEQ ID NO: 1170 - RNA, 27 nt, synthetic construct
  source 1..27: mol_type = other RNA
ctgtatgggatcaggcttccactttgg

SEQ ID NO: 1171 - RNA, 28 nt, synthetic construct
  source 1..28: mol_type = other RNA
tctgtatgggatcaggcttccacattgg

SEQ ID NO: 1172 - RNA, 28 nt, synthetic construct
  source 1..28: mol_type = other RNA
tctgtatgggatcaggcttccaccttgg

SEQ ID NO: 1173 - RNA, 28 nt, synthetic construct
  source 1..28: mol_type = other RNA
tctgtatgggatcaggcttccacgttgg

SEQ ID NO: 1174 - RNA, 28 nt, synthetic construct
  source 1..28: mol_type = other RNA
tctgtatgggatcaggcttccactttgg

SEQ ID NO: 1175 - RNA, 29 nt, synthetic construct
  source 1..29: mol_type = other RNA
ttctgtatgggatcaggcttccacattgg

SEQ ID NO: 1176 - RNA, 29 nt, synthetic construct
  source 1..29: mol_type = other RNA
ttctgtatgggatcaggcttccaccttgg

SEQ ID NO: 1177 - RNA, 29 nt, synthetic construct
  source 1..29: mol_type = other RNA
ttctgtatgggatcaggcttccacgttgg

SEQ ID NO: 1178 - RNA, 29 nt, synthetic construct
  source 1..29: mol_type = other RNA
ttctgtatgggatcaggcttccactttgg

SEQ ID NO: 1179 - RNA, 30 nt, synthetic construct
  source 1..30: mol_type = other RNA
tttctgtatgggatcaggcttccacattgg

SEQ ID NO: 1180 - RNA, 30 nt, synthetic construct
  source 1..30: mol_type = other RNA
tttctgtatgggatcaggcttccaccttgg

SEQ ID NO: 1181 - RNA, 30 nt, synthetic construct
  source 1..30: mol_type = other RNA
tttctgtatgggatcaggcttccacgttgg

SEQ ID NO: 1182 - RNA, 30 nt, synthetic construct
  source 1..30: mol_type = other RNA
tttctgtatgggatcaggcttccactttgg

SEQ ID NO: 1183 - RNA, 31 nt, synthetic construct
  source 1..31: mol_type = other RNA
ctttctgtatgggatcaggcttccacattgg

SEQ ID NO: 1184 - RNA, 31 nt, synthetic construct
  source 1..31: mol_type = other RNA
ctttctgtatgggatcaggcttccaccttgg

SEQ ID NO: 1185 - RNA, 31 nt, synthetic construct
  source 1..31: mol_type = other RNA
ctttctgtatgggatcaggcttccacgttgg

SEQ ID NO: 1186 - RNA, 31 nt, synthetic construct
  source 1..31: mol_type = other RNA
ctttctgtatgggatcaggcttccactttgg

SEQ ID NO: 1187 - RNA, 32 nt, synthetic construct
  source 1..32: mol_type = other RNA
gctttctgtatgggatcaggcttccacattgg

SEQ ID NO: 1188 - RNA, 32 nt, synthetic construct
  source 1..32: mol_type = other RNA
gctttctgtatgggatcaggcttccaccttgg

SEQ ID NO: 1189 - RNA, 32 nt, synthetic construct
  source 1..32: mol_type = other RNA
gctttctgtatgggatcaggcttccacgttgg

SEQ ID NO: 1190 - RNA, 32 nt, synthetic construct
  source 1..32: mol_type = other RNA
gctttctgtatgggatcaggcttccactttgg

SEQ ID NO: 1191 - RNA, 33 nt, synthetic construct
  source 1..33: mol_type = other RNA
agctttctgtatgggatcaggcttccacattgg

SEQ ID NO: 1192 - RNA, 33 nt, synthetic construct
  source 1..33: mol_type = other RNA
agctttctgtatgggatcaggcttccaccttgg

SEQ ID NO: 1193 - RNA, 33 nt, synthetic construct
  source 1..33: mol_type = other RNA
agctttctgtatgggatcaggcttccacgttgg

SEQ ID NO: 1194 - RNA, 33 nt, synthetic construct
  source 1..33: mol_type = other RNA
agctttctgtatgggatcaggcttccactttgg

SEQ ID NO: 1195 - RNA, 34 nt, synthetic construct
  source 1..34: mol_type = other RNA
aagctttctgtatgggatcaggcttccacattgg

SEQ ID NO: 1196 - RNA, 34 nt, synthetic construct
  source 1..34: mol_type = other RNA
aagctttctgtatgggatcaggcttccaccttgg

SEQ ID NO: 1197 - RNA, 34 nt, synthetic construct
  source 1..34: mol_type = other RNA
aagctttctgtatgggatcaggcttccacgttgg

SEQ ID NO: 1198 - RNA, 34 nt, synthetic construct
  source 1..34: mol_type = other RNA
aagctttctgtatgggatcaggcttccactttgg

SEQ ID NO: 1199 - RNA, 35 nt, synthetic construct
  source 1..35: mol_type = other RNA
gaagctttctgtatgggatcaggcttccacattgg

SEQ ID NO: 1200 - RNA, 35 nt, synthetic construct
  source 1..35: mol_type = other RNA
gaagctttctgtatgggatcaggcttccaccttgg

SEQ ID NO: 1201 - RNA, 35 nt, synthetic construct
  source 1..35: mol_type = other RNA
gaagctttctgtatgggatcaggcttccacgttgg

SEQ ID NO: 1202 - RNA, 35 nt, synthetic construct
  source 1..35: mol_type = other RNA
gaagctttctgtatgggatcaggcttccactttgg

SEQ ID NO: 1203 - RNA, 36 nt, synthetic construct
  source 1..36: mol_type = other RNA
agaagctttctgtatgggatcaggcttccacattgg

SEQ ID NO: 1204 - RNA, 36 nt, synthetic construct
  source 1..36: mol_type = other RNA
agaagctttctgtatgggatcaggcttccaccttgg

SEQ ID NO: 1205 - RNA, 36 nt, synthetic construct
  source 1..36: mol_type = other RNA
agaagctttctgtatgggatcaggcttccacgttgg

SEQ ID NO: 1206 - RNA, 36 nt, synthetic construct
  source 1..36: mol_type = other RNA
agaagctttctgtatgggatcaggcttccactttgg

SEQ ID NO: 1207 - RNA, 37 nt, synthetic construct
  source 1..37: mol_type = other RNA
cagaagctttctgtatgggatcaggcttccacattgg

SEQ ID NO: 1208 - RNA, 37 nt, synthetic construct
  source 1..37: mol_type = other RNA
cagaagctttctgtatgggatcaggcttccaccttgg

SEQ ID NO: 1209 - RNA, 37 nt, synthetic construct
  source 1..37: mol_type = other RNA
cagaagctttctgtatgggatcaggcttccacgttgg

SEQ ID NO: 1210 - RNA, 37 nt, synthetic construct
  source 1..37: mol_type = other RNA
cagaagctttctgtatgggatcaggcttccactttgg

SEQ ID NO: 1211 - RNA, 38 nt, synthetic construct
  source 1..38: mol_type = other RNA
gcagaagctttctgtatgggatcaggcttccacattgg

SEQ ID NO: 1212 - RNA, 38 nt, synthetic construct
  source 1..38: mol_type = other RNA
gcagaagctttctgtatgggatcaggcttccaccttgg

SEQ ID NO: 1213 - RNA, 38 nt, synthetic construct
  source 1..38: mol_type = other RNA
gcagaagctttctgtatgggatcaggcttccacgttgg

SEQ ID NO: 1214 - RNA, 38 nt, synthetic construct
  source 1..38: mol_type = other RNA
gcagaagctttctgtatgggatcaggcttccactttgg

SEQ ID NO: 1215 - RNA, 39 nt, synthetic construct
  source 1..39: mol_type = other RNA
tgcagaagctttctgtatgggatcaggcttccacattgg

SEQ ID NO: 1216 - RNA, 39 nt, synthetic construct
  source 1..39: mol_type = other RNA
tgcagaagctttctgtatgggatcaggcttccaccttgg

SEQ ID NO: 1217 - RNA, 39 nt, synthetic construct
  source 1..39: mol_type = other RNA
tgcagaagctttctgtatgggatcaggcttccacgttgg

SEQ ID NO: 1218 - RNA, 39 nt, synthetic construct
  source 1..39: mol_type = other RNA
tgcagaagctttctgtatgggatcaggcttccactttgg

SEQ ID NO: 1219 - RNA, 40 nt, synthetic construct
  source 1..40: mol_type = other RNA
atgcagaagctttctgtatgggatcaggcttccacattgg

SEQ ID NO: 1220 - RNA, 40 nt, synthetic construct
  source 1..40: mol_type = other RNA
atgcagaagctttctgtatgggatcaggcttccaccttgg

SEQ ID NO: 1221 - RNA, 40 nt, synthetic construct
  source 1..40: mol_type = other RNA
atgcagaagctttctgtatgggatcaggcttccacgttgg

SEQ ID NO: 1222 - RNA, 40 nt, synthetic construct
  source 1..40: mol_type = other RNA
atgcagaagctttctgtatgggatcaggcttccactttgg

SEQ ID NO: 1223 - RNA, 20 nt, synthetic construct
  source 1..20: mol_type = other RNA
atcaccttttcgctttttcc

SEQ ID NO: 1224 - RNA, 20 nt, synthetic construct
  source 1..20: mol_type = other RNA
caagatggctcaagattcag

SEQ ID NO: 1225 - RNA, 20 nt, synthetic construct
  source 1..20: mol_type = other RNA
cgctttttccaagatggctc

SEQ ID NO: 1226 - RNA, 20 nt, synthetic construct
  source 1..20: mol_type = other RNA
gtgattatcagttttggatg

SEQ ID NO: 1227 - RNA, 20 nt, synthetic construct
  source 1..20: mol_type = other RNA
gtgctggacaggctgctgtg

SEQ ID NO: 1228 - RNA, 20 nt, synthetic construct
  source 1..20: mol_type = other RNA
tagatctttcttgtgattat

SEQ ID NO: 1229 - RNA, 20 nt, synthetic construct
  source 1..20: mol_type = other RNA
ttccaagatggctcaagatt

SEQ ID NO: 1230 - RNA, 17 nt, synthetic construct
  source 1..17: mol_type = other RNA
ttgctgggtttccaaag

SEQ ID NO: 1231 - RNA, 18 nt, synthetic construct
  source 1..18: mol_type = other RNA
cttgctgggtttccaaag

SEQ ID NO: 1232 - RNA, 19 nt, synthetic construct
  source 1..19: mol_type = other RNA
tcttgctgggtttccaaag

SEQ ID NO: 1233 - RNA, 21 nt, synthetic construct
  source 1..21: mol_type = other RNA
tgtcttgctgggtttccaaag

SEQ ID NO: 1234 - RNA, 22 nt, synthetic construct
  source 1..22: mol_type = other RNA
gtgtcttgctgggtttccaaag

SEQ ID NO: 1235-1239 - skipped (5 entries)

SEQ ID NO: 1240 - RNA, 10 nt, synthetic construct
  source 1..10: mol_type = other RNA
tggaaaccca

SEQ ID NO: 1241 - RNA, 11 nt, synthetic construct
  source 1..11: mol_type = other RNA
tggaaacccag

SEQ ID NO: 1242 - RNA, 12 nt, synthetic construct
  source 1..12: mol_type = other RNA
tggaaacccagc

SEQ ID NO: 1243 - RNA, 13 nt, synthetic construct
  source 1..13: mol_type = other RNA
tggaaacccagca

SEQ ID NO: 1244 - RNA, 14 nt, synthetic construct
  source 1..14: mol_type = other RNA
tggaaacccagcaa

SEQ ID NO: 1245 - RNA, 15 nt, synthetic construct
  source 1..15: mol_type = other RNA
tggaaacccagcaag

SEQ ID NO: 1246 - RNA, 16 nt, synthetic construct
  source 1..16: mol_type = other RNA
tggaaacccagcaaga

SEQ ID NO: 1247 - RNA, 17 nt, synthetic construct
  source 1..17: mol_type = other RNA
tggaaacccagcaagac

SEQ ID NO: 1248 - RNA, 18 nt, synthetic construct
  source 1..18: mol_type = other RNA
tggaaacccagcaagaca

SEQ ID NO: 1249 - RNA, 19 nt, synthetic construct
  source 1..19: mol_type = other RNA
tggaaacccagcaagacac

SEQ ID NO: 1250 - RNA, 16 nt, synthetic construct
  source 1..16: mol_type = other RNA
gatcaggctagcactt

SEQ ID NO: 1251 - RNA, 16 nt, synthetic construct
  source 1..16: mol_type = other RNA
gatcaggctagtactt

SEQ ID NO: 1252 - RNA, 16 nt, synthetic construct
  source 1..16: mol_type = other RNA
gatcaggcttcaactt

SEQ ID NO: 1253 - RNA, 16 nt, synthetic construct
  source 1..16: mol_type = other RNA
gatcaggcttccactt

SEQ ID NO: 1254 - RNA, 16 nt, synthetic construct
  source 1..16: mol_type = other RNA
gatcaggcttcgactt

SEQ ID NO: 1255 - RNA, 16 nt, synthetic construct
  source 1..16: mol_type = other RNA
gatcaggcttctactt

SEQ ID NO: 1256 - RNA, 17 nt, synthetic construct
  source 1..17: mol_type = other RNA
ggatcaggctagcactt

SEQ ID NO: 1257 - RNA, 17 nt, synthetic construct
  source 1..17: mol_type = other RNA
ggatcaggctagtactt

SEQ ID NO: 1258 - RNA, 17 nt, synthetic construct
  source 1..17: mol_type = other RNA
ggatcaggcttcaactt

SEQ ID NO: 1259 - RNA, 17 nt, synthetic construct
  source 1..17: mol_type = other RNA
ggatcaggcttccactt

SEQ ID NO: 1260 - RNA, 17 nt, synthetic construct
  source 1..17: mol_type = other RNA
ggatcaggcttcgactt

SEQ ID NO: 1261 - RNA, 17 nt, synthetic construct
  source 1..17: mol_type = other RNA
ggatcaggcttctactt

SEQ ID NO: 1262 - RNA, 18 nt, synthetic construct
  source 1..18: mol_type = other RNA
gggatcaggctagcactt

SEQ ID NO: 1263 - RNA, 18 nt, synthetic construct
  source 1..18: mol_type = other RNA
gggatcaggctagtactt

SEQ ID NO: 1264 - RNA, 18 nt, synthetic construct
  source 1..18: mol_type = other RNA
gggatcaggcttcaactt

SEQ ID NO: 1265 - RNA, 18 nt, synthetic construct
  source 1..18: mol_type = other RNA
gggatcaggcttccactt

SEQ ID NO: 1266 - RNA, 18 nt, synthetic construct
  source 1..18: mol_type = other RNA
gggatcaggcttcgactt

SEQ ID NO: 1267 - RNA, 18 nt, synthetic construct
  source 1..18: mol_type = other RNA
gggatcaggcttctactt

SEQ ID NO: 1268 - RNA, 19 nt, synthetic construct
  source 1..19: mol_type = other RNA
tgggatcaggctagcactt

SEQ ID NO: 1269 - RNA, 19 nt, synthetic construct
  source 1..19: mol_type = other RNA
tgggatcaggctagtactt

SEQ ID NO: 1270 - RNA, 19 nt, synthetic construct
  source 1..19: mol_type = other RNA
tgggatcaggcttcaactt

SEQ ID NO: 1271 - RNA, 19 nt, synthetic construct
  source 1..19: mol_type = other RNA
tgggatcaggcttccactt

SEQ ID NO: 1272 - RNA, 19 nt, synthetic construct
  source 1..19: mol_type = other RNA
tgggatcaggcttcgactt

SEQ ID NO: 1273 - RNA, 19 nt, synthetic construct
  source 1..19: mol_type = other RNA
tgggatcaggcttctactt

SEQ ID NO: 1274 - RNA, 20 nt, synthetic construct
  source 1..20: mol_type = other RNA
atgggatcaggctagcactt

SEQ ID NO: 1275 - RNA, 20 nt, synthetic construct
  source 1..20: mol_type = other RNA
atgggatcaggctagtactt

SEQ ID NO: 1276 - RNA, 20 nt, synthetic construct
  source 1..20: mol_type = other RNA
atgggatcaggcttcaactt

SEQ ID NO: 1277 - RNA, 20 nt, synthetic construct
  source 1..20: mol_type = other RNA
atgggatcaggcttcgactt

SEQ ID NO: 1278 - RNA, 20 nt, synthetic construct
  source 1..20: mol_type = other RNA
atgggatcaggcttctactt

SEQ ID NO: 1279 - RNA, 21 nt, synthetic construct
  source 1..21: mol_type = other RNA
tatgggatcaggctagcactt

SEQ ID NO: 1280 - RNA, 21 nt, synthetic construct
  source 1..21: mol_type = other RNA
tatgggatcaggctagtactt

SEQ ID NO: 1281 - RNA, 21 nt, synthetic construct
  source 1..21: mol_type = other RNA
tatgggatcaggcttcaactt

SEQ ID NO: 1282 - RNA, 21 nt, synthetic construct
  source 1..21: mol_type = other RNA
tatgggatcaggcttccactt

SEQ ID NO: 1283 - RNA, 21 nt, synthetic construct
  source 1..21: mol_type = other RNA
tatgggatcaggcttcgactt

SEQ ID NO: 1284 - RNA, 21 nt, synthetic construct
  source 1..21: mol_type = other RNA
tatgggatcaggcttctactt

SEQ ID NO: 1285 - RNA, 22 nt, synthetic construct
  source 1..22: mol_type = other RNA
gtatgggatcaggctagcactt

SEQ ID NO: 1286 - RNA, 22 nt, synthetic construct
  source 1..22: mol_type = other RNA
gtatgggatcaggctagtactt

SEQ ID NO: 1287 - RNA, 22 nt, synthetic construct
  source 1..22: mol_type = other RNA
gtatgggatcaggcttcaactt

SEQ ID NO: 1288 - RNA, 22 nt, synthetic construct
  source 1..22: mol_type = other RNA
gtatgggatcaggcttccactt

SEQ ID NO: 1289 - RNA, 22 nt, synthetic construct
  source 1..22: mol_type = other RNA
gtatgggatcaggcttcgactt

SEQ ID NO: 1290 - RNA, 22 nt, synthetic construct
  source 1..22: mol_type = other RNA
gtatgggatcaggcttctactt

SEQ ID NO: 1291 - RNA, 23 nt, synthetic construct
  source 1..23: mol_type = other RNA
tgtatgggatcaggctagcactt

SEQ ID NO: 1292 - RNA, 23 nt, synthetic construct
  source 1..23: mol_type = other RNA
tgtatgggatcaggctagtactt

SEQ ID NO: 1293 - RNA, 23 nt, synthetic construct
  source 1..23: mol_type = other RNA
tgtatgggatcaggcttcaactt

SEQ ID NO: 1294 - RNA, 23 nt, synthetic construct
  source 1..23: mol_type = other RNA
tgtatgggatcaggcttccactt

SEQ ID NO: 1295 - RNA, 23 nt, synthetic construct
  source 1..23: mol_type = other RNA
tgtatgggatcaggcttcgactt

SEQ ID NO: 1296 - RNA, 23 nt, synthetic construct
  source 1..23: mol_type = other RNA
tgtatgggatcaggcttctactt

SEQ ID NO: 1297 - RNA, 24 nt, synthetic construct
  source 1..24: mol_type = other RNA
ctgtatgggatcaggctagcactt

SEQ ID NO: 1298 - RNA, 24 nt, synthetic construct
  source 1..24: mol_type = other RNA
ctgtatgggatcaggctagtactt

SEQ ID NO: 1299 - RNA, 24 nt, synthetic construct
  source 1..24: mol_type = other RNA
ctgtatgggatcaggcttcaactt

SEQ ID NO: 1300 - RNA, 24 nt, synthetic construct
  source 1..24: mol_type = other RNA
ctgtatgggatcaggcttccactt

SEQ ID NO: 1301 - RNA, 24 nt, synthetic construct
  source 1..24: mol_type = other RNA
ctgtatgggatcaggcttcgactt

SEQ ID NO: 1302 - RNA, 24 nt, synthetic construct
  source 1..24: mol_type = other RNA
ctgtatgggatcaggcttctactt

SEQ ID NO: 1303 - RNA, 25 nt, synthetic construct
  source 1..25: mol_type = other RNA
tctgtatgggatcaggctagcactt

SEQ ID NO: 1304 - RNA, 25 nt, synthetic construct
  source 1..25: mol_type = other RNA
tctgtatgggatcaggctagtactt

SEQ ID NO: 1305 - RNA, 25 nt, synthetic construct
  source 1..25: mol_type = other RNA
tctgtatgggatcaggcttcaactt

SEQ ID NO: 1306 - RNA, 25 nt, synthetic construct
  source 1..25: mol_type = other RNA
tctgtatgggatcaggcttccactt

SEQ ID NO: 1307 - RNA, 25 nt, synthetic construct
  source 1..25: mol_type = other RNA
tctgtatgggatcaggcttcgactt

SEQ ID NO: 1308 - RNA, 25 nt, synthetic construct
  source 1..25: mol_type = other RNA
tctgtatgggatcaggcttctactt

SEQ ID NO: 1309 - RNA, 26 nt, synthetic construct
  source 1..26: mol_type = other RNA
ttctgtatgggatcaggctagcactt

SEQ ID NO: 1310 - RNA, 26 nt, synthetic construct
  source 1..26: mol_type = other RNA
ttctgtatgggatcaggctagtactt

SEQ ID NO: 1311 - RNA, 26 nt, synthetic construct
  source 1..26: mol_type = other RNA
ttctgtatgggatcaggcttcaactt

SEQ ID NO: 1312 - RNA, 26 nt, synthetic construct
  source 1..26: mol_type = other RNA
ttctgtatgggatcaggcttccactt

SEQ ID NO: 1313 - RNA, 26 nt, synthetic construct
  source 1..26: mol_type = other RNA
ttctgtatgggatcaggcttcgactt

SEQ ID NO: 1314 - RNA, 26 nt, synthetic construct
  source 1..26: mol_type = other RNA
ttctgtatgggatcaggcttctactt

SEQ ID NO: 1315 - RNA, 27 nt, synthetic construct
  source 1..27: mol_type = other RNA
tttctgtatgggatcaggctagcactt

SEQ ID NO: 1316 - RNA, 27 nt, synthetic construct
  source 1..27: mol_type = other RNA
tttctgtatgggatcaggctagtactt

SEQ ID NO: 1317 - RNA, 27 nt, synthetic construct
  source 1..27: mol_type = other RNA
tttctgtatgggatcaggcttcaactt

SEQ ID NO: 1318 - RNA, 27 nt, synthetic construct
  source 1..27: mol_type = other RNA
tttctgtatgggatcaggcttccactt

SEQ ID NO: 1319 - RNA, 27 nt, synthetic construct
  source 1..27: mol_type = other RNA
tttctgtatgggatcaggcttcgactt

SEQ ID NO: 1320 - RNA, 27 nt, synthetic construct
  source 1..27: mol_type = other RNA
tttctgtatgggatcaggcttctactt

SEQ ID NO: 1321 - RNA, 28 nt, synthetic construct
  source 1..28: mol_type = other RNA
ctttctgtatgggatcaggctagcactt

SEQ ID NO: 1322 - RNA, 28 nt, synthetic construct
  source 1..28: mol_type = other RNA
ctttctgtatgggatcaggctagtactt

SEQ ID NO: 1323 - RNA, 28 nt, synthetic construct
  source 1..28: mol_type = other RNA
ctttctgtatgggatcaggcttcaactt

SEQ ID NO: 1324 - RNA, 28 nt, synthetic construct
  source 1..28: mol_type = other RNA
ctttctgtatgggatcaggcttccactt

SEQ ID NO: 1325 - RNA, 28 nt, synthetic construct
  source 1..28: mol_type = other RNA
ctttctgtatgggatcaggcttcgactt

SEQ ID NO: 1326 - RNA, 28 nt, synthetic construct
  source 1..28: mol_type = other RNA
ctttctgtatgggatcaggcttctactt

SEQ ID NO: 1327 - RNA, 29 nt, synthetic construct
  source 1..29: mol_type = other RNA
gctttctgtatgggatcaggctagcactt

SEQ ID NO: 1328 - RNA, 29 nt, synthetic construct
  source 1..29: mol_type = other RNA
gctttctgtatgggatcaggctagtactt

SEQ ID NO: 1329 - RNA, 29 nt, synthetic construct
  source 1..29: mol_type = other RNA
gctttctgtatgggatcaggcttcaactt

SEQ ID NO: 1330 - RNA, 29 nt, synthetic construct
  source 1..29: mol_type = other RNA
gctttctgtatgggatcaggcttccactt

SEQ ID NO: 1331 - RNA, 29 nt, synthetic construct
  source 1..29: mol_type = other RNA
gctttctgtatgggatcaggcttcgactt

SEQ ID NO: 1332 - RNA, 29 nt, synthetic construct
  source 1..29: mol_type = other RNA
gctttctgtatgggatcaggcttctactt

SEQ ID NO: 1333 - RNA, 30 nt, synthetic construct
  source 1..30: mol_type = other RNA
agctttctgtatgggatcaggctagcactt

SEQ ID NO: 1334 - RNA, 30 nt, synthetic construct
  source 1..30: mol_type = other RNA
agctttctgtatgggatcaggctagtactt

SEQ ID NO: 1335 - RNA, 30 nt, synthetic construct
  source 1..30: mol_type = other RNA
agctttctgtatgggatcaggcttcaactt

SEQ ID NO: 1336 - RNA, 30 nt, synthetic construct
  source 1..30: mol_type = other RNA
agctttctgtatgggatcaggcttccactt

SEQ ID NO: 1337 - RNA, 30 nt, synthetic construct
  source 1..30: mol_type = other RNA
agctttctgtatgggatcaggcttcgactt

SEQ ID NO: 1338 - RNA, 30 nt, synthetic construct
  source 1..30: mol_type = other RNA
agctttctgtatgggatcaggcttctactt

SEQ ID NO: 1339 - RNA, 31 nt, synthetic construct
  source 1..31: mol_type = other RNA
aagctttctgtatgggatcaggctagcactt

SEQ ID NO: 1340 - RNA, 31 nt, synthetic construct
  source 1..31: mol_type = other RNA
aagctttctgtatgggatcaggctagtactt

SEQ ID NO: 1341 - RNA, 31 nt, synthetic construct
  source 1..31: mol_type = other RNA
aagctttctgtatgggatcaggcttcaactt

SEQ ID NO: 1342 - RNA, 31 nt, synthetic construct
  source 1..31: mol_type = other RNA
aagctttctgtatgggatcaggcttccactt

SEQ ID NO: 1343 - RNA, 31 nt, synthetic construct
  source 1..31: mol_type = other RNA
aagctttctgtatgggatcaggcttcgactt

SEQ ID NO: 1344 - RNA, 31 nt, synthetic construct
  source 1..31: mol_type = other RNA
aagctttctgtatgggatcaggcttctactt

SEQ ID NO: 1345 - RNA, 32 nt, synthetic construct
  source 1..32: mol_type = other RNA
gaagctttctgtatgggatcaggctagcactt

SEQ ID NO: 1346 - RNA, 32 nt, synthetic construct
  source 1..32: mol_type = other RNA
gaagctttctgtatgggatcaggctagtactt

SEQ ID NO: 1347 - RNA, 32 nt, synthetic construct
  source 1..32: mol_type = other RNA
gaagctttctgtatgggatcaggcttcaactt

SEQ ID NO: 1348 - RNA, 32 nt, synthetic construct
  source 1..32: mol_type = other RNA
gaagctttctgtatgggatcaggcttccactt

SEQ ID NO: 1349 - RNA, 32 nt, synthetic construct
  source 1..32: mol_type = other RNA
gaagctttctgtatgggatcaggcttcgactt

SEQ ID NO: 1350 - RNA, 32 nt, synthetic construct
  source 1..32: mol_type = other RNA
gaagctttctgtatgggatcaggcttctactt

SEQ ID NO: 1351 - RNA, 33 nt, synthetic construct
  source 1..33: mol_type = other RNA
agaagctttctgtatgggatcaggctagcactt

SEQ ID NO: 1352 - RNA, 33 nt, synthetic construct
  source 1..33: mol_type = other RNA
agaagctttctgtatgggatcaggctagtactt

SEQ ID NO: 1353 - RNA, 33 nt, synthetic construct
  source 1..33: mol_type = other RNA
agaagctttctgtatgggatcaggcttcaactt

SEQ ID NO: 1354 - RNA, 33 nt, synthetic construct
  source 1..33: mol_type = other RNA
agaagctttctgtatgggatcaggcttccactt

SEQ ID NO: 1355 - RNA, 33 nt, synthetic construct
  source 1..33: mol_type = other RNA
agaagctttctgtatgggatcaggcttcgactt

SEQ ID NO: 1356 - RNA, 33 nt, synthetic construct
  source 1..33: mol_type = other RNA
agaagctttctgtatgggatcaggcttctactt

SEQ ID NO: 1357 - RNA, 34 nt, synthetic construct
  source 1..34: mol_type = other RNA
cagaagctttctgtatgggatcaggctagcactt

SEQ ID NO: 1358 - RNA, 34 nt, synthetic construct
  source 1..34: mol_type = other RNA
cagaagctttctgtatgggatcaggctagtactt

SEQ ID NO: 1359 - RNA, 34 nt, synthetic construct
  source 1..34: mol_type = other RNA
cagaagctttctgtatgggatcaggcttcaactt

SEQ ID NO: 1360 - RNA, 34 nt, synthetic construct
  source 1..34: mol_type = other RNA
cagaagctttctgtatgggatcaggcttccactt

SEQ ID NO: 1361 - RNA, 34 nt, synthetic construct
  source 1..34: mol_type = other RNA
cagaagctttctgtatgggatcaggcttcgactt

SEQ ID NO: 1362 - RNA, 34 nt, synthetic construct
  source 1..34: mol_type = other RNA
cagaagctttctgtatgggatcaggcttctactt

SEQ ID NO: 1363 - RNA, 35 nt, synthetic construct
  source 1..35: mol_type = other RNA
gcagaagctttctgtatgggatcaggctagcactt

SEQ ID NO: 1364 - RNA, 35 nt, synthetic construct
  source 1..35: mol_type = other RNA
gcagaagctttctgtatgggatcaggctagtactt

SEQ ID NO: 1365 - RNA, 35 nt, synthetic construct
  source 1..35: mol_type = other RNA
gcagaagctttctgtatgggatcaggcttcaactt

SEQ ID NO: 1366 - RNA, 35 nt, synthetic construct
  source 1..35: mol_type = other RNA
gcagaagctttctgtatgggatcaggcttccactt

SEQ ID NO: 1367 - RNA, 35 nt, synthetic construct
  source 1..35: mol_type = other RNA
gcagaagctttctgtatgggatcaggcttcgactt

SEQ ID NO: 1368 - RNA, 35 nt, synthetic construct
  source 1..35: mol_type = other RNA
gcagaagctttctgtatgggatcaggcttctactt

SEQ ID NO: 1369 - RNA, 36 nt, synthetic construct
  source 1..36: mol_type = other RNA
tgcagaagctttctgtatgggatcaggctagcactt

SEQ ID NO: 1370 - RNA, 36 nt, synthetic construct
  source 1..36: mol_type = other RNA
tgcagaagctttctgtatgggatcaggctagtactt

SEQ ID NO: 1371 - RNA, 36 nt, synthetic construct
  source 1..36: mol_type = other RNA
tgcagaagctttctgtatgggatcaggcttcaactt

SEQ ID NO: 1372 - RNA, 36 nt, synthetic construct
  source 1..36: mol_type = other RNA
tgcagaagctttctgtatgggatcaggcttccactt

SEQ ID NO: 1373 - RNA, 36 nt, synthetic construct
  source 1..36: mol_type = other RNA
tgcagaagctttctgtatgggatcaggcttcgactt

SEQ ID NO: 1374 - RNA, 36 nt, synthetic construct
  source 1..36: mol_type = other RNA
tgcagaagctttctgtatgggatcaggcttctactt

SEQ ID NO: 1375 - RNA, 37 nt, synthetic construct
  source 1..37: mol_type = other RNA
atgcagaagctttctgtatgggatcaggctagcactt

SEQ ID NO: 1376 - RNA, 37 nt, synthetic construct
  source 1..37: mol_type = other RNA
atgcagaagctttctgtatgggatcaggctagtactt

SEQ ID NO: 1377 - RNA, 37 nt, synthetic construct
  source 1..37: mol_type = other RNA
atgcagaagctttctgtatgggatcaggcttcaactt

SEQ ID NO: 1378 - RNA, 37 nt, synthetic construct
  source 1..37: mol_type = other RNA
atgcagaagctttctgtatgggatcaggcttccactt

SEQ ID NO: 1379 - RNA, 37 nt, synthetic construct
  source 1..37: mol_type = other RNA
atgcagaagctttctgtatgggatcaggcttcgactt

SEQ ID NO: 1380 - RNA, 37 nt, synthetic construct
  source 1..37: mol_type = other RNA
atgcagaagctttctgtatgggatcaggcttctactt

SEQ ID NO: 1381 - RNA, 38 nt, synthetic construct
  source 1..38: mol_type = other RNA
gatgcagaagctttctgtatgggatcaggctagcactt

SEQ ID NO: 1382 - RNA, 38 nt, synthetic construct
  source 1..38: mol_type = other RNA
gatgcagaagctttctgtatgggatcaggctagtactt

SEQ ID NO: 1383 - RNA, 38 nt, synthetic construct
  source 1..38: mol_type = other RNA
gatgcagaagctttctgtatgggatcaggcttcaactt

SEQ ID NO: 1384 - RNA, 38 nt, synthetic construct
  source 1..38: mol_type = other RNA
gatgcagaagctttctgtatgggatcaggcttccactt

SEQ ID NO: 1385 - RNA, 38 nt, synthetic construct
  source 1..38: mol_type = other RNA
gatgcagaagctttctgtatgggatcaggcttcgactt

SEQ ID NO: 1386 - RNA, 38 nt, synthetic construct
  source 1..38: mol_type = other RNA
gatgcagaagctttctgtatgggatcaggcttctactt

SEQ ID NO: 1387 - RNA, 39 nt, synthetic construct
  source 1..39: mol_type = other RNA
ggatgcagaagctttctgtatgggatcaggctagcactt

SEQ ID NO: 1388 - RNA, 39 nt, synthetic construct
  source 1..39: mol_type = other RNA
ggatgcagaagctttctgtatgggatcaggctagtactt

SEQ ID NO: 1389 - RNA, 39 nt, synthetic construct
  source 1..39: mol_type = other RNA
ggatgcagaagctttctgtatgggatcaggcttcaactt

SEQ ID NO: 1390 - RNA, 39 nt, synthetic construct
  source 1..39: mol_type = other RNA
ggatgcagaagctttctgtatgggatcaggcttccactt

SEQ ID NO: 1391 - RNA, 39 nt, synthetic construct
  source 1..39: mol_type = other RNA
ggatgcagaagctttctgtatgggatcaggcttcgactt

SEQ ID NO: 1392 - RNA, 39 nt, synthetic construct
  source 1..39: mol_type = other RNA
ggatgcagaagctttctgtatgggatcaggcttctactt

SEQ ID NO: 1393 - RNA, 40 nt, synthetic construct
  source 1..40: mol_type = other RNA
tggatgcagaagctttctgtatgggatcaggctagcactt

SEQ ID NO: 1394 - RNA, 40 nt, synthetic construct
  source 1..40: mol_type = other RNA
tggatgcagaagctttctgtatgggatcaggctagtactt

SEQ ID NO: 1395 - RNA, 40 nt, synthetic construct
  source 1..40: mol_type = other RNA
tggatgcagaagctttctgtatgggatcaggcttcaactt

SEQ ID NO: 1396 - RNA, 40 nt, synthetic construct
  source 1..40: mol_type = other RNA
tggatgcagaagctttctgtatgggatcaggcttccactt

SEQ ID NO: 1397 - RNA, 40 nt, synthetic construct
  source 1..40: mol_type = other RNA
tggatgcagaagctttctgtatgggatcaggcttcgactt

SEQ ID NO: 1398 - RNA, 40 nt, synthetic construct
  source 1..40: mol_type = other RNA
tggatgcagaagctttctgtatgggatcaggcttctactt

SEQ ID NO: 1399 - RNA, 20 nt, synthetic construct
  source 1..20: mol_type = other RNA
tgggatcaggctagtacttt

SEQ ID NO: 1400 - RNA, 20 nt, synthetic construct
  source 1..20: mol_type = other RNA
tgggatcaggcttcaacttt

SEQ ID NO: 1401 - RNA, 20 nt, synthetic construct
  source 1..20: mol_type = other RNA
tgggatcaggcttcgacttt

SEQ ID NO: 1402 - RNA, 20 nt, synthetic construct
  source 1..20: mol_type = other RNA
tgggatcaggcttctacttt

SEQ ID NO: 1403 - RNA, 124 nt, synthetic construct
  source 1..124: mol_type = other RNA
gtcttgctgggtttccaaaggttttagagctagaaatagcaagttaaaataaggctagtccgttatcaacttgaaaaagtggcaccgagtcggtgcatgggatcaggcttccactttggaaacc

SEQ ID NO: 1404 - RNA, 126 nt, synthetic construct
  source 1..126: mol_type = other RNA
gtcttgctgggtttccaaaggttttagagctagaaatagcaagttaaaataaggctagtccgttatcaacttgaaaaagtggcaccgagtcggtgcatgggatcaggcttccactttggaaaccca

SEQ ID NO: 1405 - RNA, 126 nt, synthetic construct
  source 1..126: mol_type = other RNA
gtcttgctgggtttccaaaggttttagagctagaaatagcaagttaaaataaggctagtccgttatcaacttgaaaaagtggcaccgagtcggtgcgtatgggatcaggcttccactttggaaacc

SEQ ID NO: 1406 - RNA, 128 nt, synthetic construct
  source 1..128: mol_type = other RNA
gtcttgctgggtttccaaaggttttagagctagaaatagcaagttaaaataaggctagtccgttatcaacttgaaaaagtggcaccgagtcggtgcatgggatcaggcttccactttggaaacccagc

SEQ ID NO: 1407 - RNA, 128 nt, synthetic construct
  source 1..128: mol_type = other RNA
gtcttgctgggtttccaaaggttttagagctagaaatagcaagttaaaataaggctagtccgttatcaacttgaaaaagtggcaccgagtcggtgcgtatgggatcaggcttccactttggaaaccca

SEQ ID NO: 1408 - RNA, 128 nt, synthetic construct
  source 1..128: mol_type = other RNA
gtcttgctgggtttccaaaggttttagagctagaaatagcaagttaaaataaggctagtccgttatcaacttgaaaaagtggcaccgagtcggtgcatgggatcaggcttccactttggaaacctttt

SEQ ID NO: 1409 - RNA, 129 nt, synthetic construct
  source 1..129: mol_type = other RNA
gtcttgctgggtttccaaaggttttagagctagaaatagcaagttaaaataaggctagtccgttatcaacttgaaaaagtggcaccgagtcggtgctctgtatgggatcaggcttccactttggaaacc

SEQ ID NO: 1410 - RNA, 130 nt, synthetic construct
  source 1..130: mol_type = other RNA
gtcttgctgggtttccaaaggttttagagctagaaatagcaagttaaaataaggctagtccgttatcaacttgaaaaagtggcaccgagtcggtgcatgggatcaggcttccactttggaaacccagcaa

SEQ ID NO: 1411 - RNA, 130 nt, synthetic construct
  source 1..130: mol_type = other RNA
gtcttgctgggtttccaaaggttttagagctagaaatagcaagttaaaataaggctagtccgttatcaacttgaaaaagtggcaccgagtcggtgcgtatgggatcaggcttccactttggaaacccagc

SEQ ID NO: 1412 - RNA, 130 nt, synthetic construct
  source 1..130: mol_type = other RNA
gtcttgctgggtttccaaaggttttagagctagaaatagcaagttaaaataaggctagtccgttatcaacttgaaaaagtggcaccgagtcggtgcatgggatcaggcttccactttggaaacccatttt

SEQ ID NO: 1413 - RNA, 130 nt, synthetic construct
  source 1..130: mol_type = other RNA
gtcttgctgggtttccaaaggttttagagctagaaatagcaagttaaaataaggctagtccgttatcaacttgaaaaagtggcaccgagtcggtgcgtatgggatcaggcttccactttggaaacctttt

SEQ ID NO: 1414 - RNA, 131 nt, synthetic construct
  source 1..131: mol_type = other RNA
gtcttgctgggtttccaaaggttttagagctagaaatagcaagttaaaataaggctagtccgttatcaacttgaaaaagtggcaccgagtcggtgctctgtatgggatcaggcttccactttggaaaccca

SEQ ID NO: 1415 - RNA, 131 nt, synthetic construct
  source 1..131: mol_type = other RNA
gtcttgctgggtttccaaaggttttagagctagaaatagcaagttaaaataaggctagtccgttatcaacttgaaaaagtggcaccgagtcggtgctttctgtatgggatcaggcttccactttggaaacc

SEQ ID NO: 1416 - RNA, 132 nt, synthetic construct
  source 1..132: mol_type = other RNA
gtcttgctgggtttccaaaggttttagagctagaaatagcaagttaaaataaggctagtccgttatcaacttgaaaaagtggcaccgagtcggtgcgtatgggatcaggcttccactttggaaacccagcaa

SEQ ID NO: 1417 - RNA, 132 nt, synthetic construct
  source 1..132: mol_type = other RNA
gtcttgctgggtttccaaaggttttagagctagaaatagcaagttaaaataaggctagtccgttatcaacttgaaaaagtggcaccgagtcggtgcatgggatcaggcttccactttggaaacccagctttt

SEQ ID NO: 1418 - RNA, 132 nt, synthetic construct
  source 1..132: mol_type = other RNA
gtcttgctgggtttccaaaggttttagagctagaaatagcaagttaaaataaggctagtccgttatcaacttgaaaaagtggcaccgagtcggtgcgtatgggatcaggcttccactttggaaacccatttt

SEQ ID NO: 1419 - RNA, 133 nt, synthetic construct
  source 1..133: mol_type = other RNA
gtcttgctgggtttccaaaggttttagagctagaaatagcaagttaaaataaggctagtccgttatcaacttgaaaaagtggcaccgagtcggtgctctgtatgggatcaggcttccactttggaaacccagc

SEQ ID NO: 1420 - RNA, 133 nt, synthetic construct
  source 1..133: mol_type = other RNA
gtcttgctgggtttccaaaggttttagagctagaaatagcaagttaaaataaggctagtccgttatcaacttgaaaaagtggcaccgagtcggtgctttctgtatgggatcaggcttccactttggaaaccca

SEQ ID NO: 1421 - RNA, 133 nt, synthetic construct
  source 1..133: mol_type = other RNA
gtcttgctgggtttccaaaggttttagagctagaaatagcaagttaaaataaggctagtccgttatcaacttgaaaaagtggcaccgagtcggtgcgctttctgtatgggatcaggcttccactttggaaacc

SEQ ID NO: 1422 - RNA, 133 nt, synthetic construct
  source 1..133: mol_type = other RNA
gtcttgctgggtttccaaaggttttagagctagaaatagcaagttaaaataaggctagtccgttatcaacttgaaaaagtggcaccgagtcggtgctctgtatgggatcaggcttccactttggaaacctttt

SEQ ID NO: 1423 - RNA, 134 nt, synthetic construct
  source 1..134: mol_type = other RNA
gtcttgctgggtttccaaaggttttagagctagaaatagcaagttaaaataaggctagtccgttatcaacttgaaaaagtggcaccgagtcggtgcatgggatcaggcttccactttggaaacccagcaatttt

SEQ ID NO: 1424 - RNA, 134 nt, synthetic construct
  source 1..134: mol_type = other RNA
gtcttgctgggtttccaaaggttttagagctagaaatagcaagttaaaataaggctagtccgttatcaacttgaaaaagtggcaccgagtcggtgcgtatgggatcaggcttccactttggaaacccagctttt

SEQ ID NO: 1425 - RNA, 135 nt, synthetic construct
  source 1..135: mol_type = other RNA
gtcttgctgggtttccaaaggttttagagctagaaatagcaagttaaaataaggctagtccgttatcaacttgaaaaagtggcaccgagtcggtgctctgtatgggatcaggcttccactttggaaacccagcaa

SEQ ID NO: 1426 - RNA, 135 nt, synthetic construct
  source 1..135: mol_type = other RNA
gtcttgctgggtttccaaaggttttagagctagaaatagcaagttaaaataaggctagtccgttatcaacttgaaaaagtggcaccgagtcggtgctttctgtatgggatcaggcttccactttggaaacccagc

SEQ ID NO: 1427 - RNA, 135 nt, synthetic construct
  source 1..135: mol_type = other RNA
gtcttgctgggtttccaaaggttttagagctagaaatagcaagttaaaataaggctagtccgttatcaacttgaaaaagtggcaccgagtcggtgcgctttctgtatgggatcaggcttccactttggaaaccca

SEQ ID NO: 1428 - RNA, 135 nt, synthetic construct
  source 1..135: mol_type = other RNA
gtcttgctgggtttccaaaggttttagagctagaaatagcaagttaaaataaggctagtccgttatcaacttgaaaaagtggcaccgagtcggtgctctgtatgggatcaggcttccactttggaaacccatttt

SEQ ID NO: 1429 - RNA, 135 nt, synthetic construct
  source 1..135: mol_type = other RNA
gtcttgctgggtttccaaaggttttagagctagaaatagcaagttaaaataaggctagtccgttatcaacttgaaaaagtggcaccgagtcggtgctttctgtatgggatcaggcttccactttggaaacctttt

SEQ ID NO: 1430 - RNA, 136 nt, synthetic construct
  source 1..136: mol_type = other RNA
gtcttgctgggtttccaaaggttttagagctagaaatagcaagttaaaataaggctagtccgttatcaacttgaaaaagtggcaccgagtcggtgcgtatgggatcaggcttccactttggaaacccagcaatttt

SEQ ID NO: 1431 - RNA, 137 nt, synthetic construct
  source 1..137: mol_type = other RNA
gtcttgctgggtttccaaaggttttagagctagaaatagcaagttaaaataaggctagtccgttatcaacttgaaaaagtggcaccgagtcggtgctttctgtatgggatcaggcttccactttggaaacccagcaa

SEQ ID NO: 1432 - RNA, 137 nt, synthetic construct
  source 1..137: mol_type = other RNA
gtcttgctgggtttccaaaggttttagagctagaaatagcaagttaaaataaggctagtccgttatcaacttgaaaaagtggcaccgagtcggtgcgctttctgtatgggatcaggcttccactttggaaacccagc

SEQ ID NO: 1433 - RNA, 137 nt, synthetic construct
  source 1..137: mol_type = other RNA
gtcttgctgggtttccaaaggttttagagctagaaatagcaagttaaaataaggctagtccgttatcaacttgaaaaagtggcaccgagtcggtgctctgtatgggatcaggcttccactttggaaacccagctttt

SEQ ID NO: 1434 - RNA, 137 nt, synthetic construct
  source 1..137: mol_type = other RNA
gtcttgctgggtttccaaaggttttagagctagaaatagcaagttaaaataaggctagtccgttatcaacttgaaaaagtggcaccgagtcggtgctttctgtatgggatcaggcttccactttggaaacccatttt

SEQ ID NO: 1435 - RNA, 137 nt, synthetic construct
  source 1..137: mol_type = other RNA
gtcttgctgggtttccaaaggttttagagctagaaatagcaagttaaaataaggctagtccgttatcaacttgaaaaagtggcaccgagtcggtgcgctttctgtatgggatcaggcttccactttggaaacctttt

SEQ ID NO: 1436 - RNA, 139 nt, synthetic construct
  source 1..139: mol_type = other RNA
gtcttgctgggtttccaaaggttttagagctagaaatagcaagttaaaataaggctagtccgttatcaacttgaaaaagtggcaccgagtcggtgcgctttctgtatgggatcaggcttccactttggaaacccagcaa

SEQ ID NO: 1437 - RNA, 139 nt, synthetic construct
  source 1..139: mol_type = other RNA
gtcttgctgggtttccaaaggttttagagctagaaatagcaagttaaaataaggctagtccgttatcaacttgaaaaagtggcaccgagtcggtgctctgtatgggatcaggcttccactttggaaacccagcaatttt

SEQ ID NO: 1438 - RNA, 139 nt, synthetic construct
  source 1..139: mol_type = other RNA
gtcttgctgggtttccaaaggttttagagctagaaatagcaagttaaaataaggctagtccgttatcaacttgaaaaagtggcaccgagtcggtgctttctgtatgggatcaggcttccactttggaaacccagctttt

SEQ ID NO: 1439 - RNA, 139 nt, synthetic construct
  source 1..139: mol_type = other RNA
gtcttgctgggtttccaaaggttttagagctagaaatagcaagttaaaataaggctagtccgttatcaacttgaaaaagtggcaccgagtcggtgcgctttctgtatgggatcaggcttccactttggaaacccatttt

SEQ ID NO: 1440 - RNA, 141 nt, synthetic construct
  source 1..141: mol_type = other RNA
gtcttgctgggtttccaaaggttttagagctagaaatagcaagttaaaataaggctagtccgttatcaacttgaaaaagtggcaccgagtcggtgctttctgtatgggatcaggcttccactttggaaacccagcaatttt

SEQ ID NO: 1441 - RNA, 141 nt, synthetic construct
  source 1..141: mol_type = other RNA
gtcttgctgggtttccaaaggttttagagctagaaatagcaagttaaaataaggctagtccgttatcaacttgaaaaagtggcaccgagtcggtgcgctttctgtatgggatcaggcttccactttggaaacccagctttt

SEQ ID NO: 1442 - RNA, 143 nt, synthetic construct
  source 1..143: mol_type = other RNA
gtcttgctgggtttccaaaggttttagagctagaaatagcaagttaaaataaggctagtccgttatcaacttgaaaaagtggcaccgagtcggtgcgctttctgtatgggatcaggcttccactttggaaacccagcaatttt

SEQ ID NO: 1443 - RNA, 158 nt, synthetic construct
  source 1..158: mol_type = other RNA
gtcttgctgggtttccaaaggttttagagctagaaatagcaagttaaaataaggctagtccgttatcaacttgaaaaagtggcaccgagtcggtgcatgggatcaggcttccactttggaaaccaacattgacgcgtctctacgtgggggcgcgtttt

SEQ ID NO: 1444 - RNA, 160 nt, synthetic construct
  source 1..160: mol_type = other RNA
gtcttgctgggtttccaaaggttttagagctagaaatagcaagttaaaataaggctagtccgttatcaacttgaaaaagtggcaccgagtcggtgcatgggatcaggcttccactttggaaacccaaacattgacgcgtctctacgtgggggcgcgtttt

SEQ ID NO: 1445 - RNA, 160 nt, synthetic construct
  source 1..160: mol_type = other RNA
gtcttgctgggtttccaaaggttttagagctagaaatagcaagttaaaataaggctagtccgttatcaacttgaaaaagtggcaccgagtcggtgcgtatgggatcaggcttccactttggaaaccaacattgacgcgtctctacgtgggggcgcgtttt

SEQ ID NO: 1446 - RNA, 162 nt, synthetic construct
  source 1..162: mol_type = other RNA
gtcttgctgggtttccaaaggttttagagctagaaatagcaagttaaaataaggctagtccgttatcaacttgaaaaagtggcaccgagtcggtgcatgggatcaggcttccactttggaaacccagcaacattgacgcgtctctacgtgggggcgcgtttt

SEQ ID NO: 1447 - RNA, 162 nt, synthetic construct
  source 1..162: mol_type = other RNA
gtcttgctgggtttccaaaggttttagagctagaaatagcaagttaaaataaggctagtccgttatcaacttgaaaaagtggcaccgagtcggtgcgtatgggatcaggcttccactttggaaacccaaacattgacgcgtctctacgtgggggcgcgtttt

SEQ ID NO: 1448 - RNA, 163 nt, synthetic construct
  source 1..163: mol_type = other RNA
gtcttgctgggtttccaaaggttttagagctagaaatagcaagttaaaataaggctagtccgttatcaacttgaaaaagtggcaccgagtcggtgctctgtatgggatcaggcttccactttggaaaccaacattgacgcgtctctacgtgggggcgcgtttt

SEQ ID NO: 1449 - RNA, 164 nt, synthetic construct
  source 1..164: mol_type = other RNA
gtcttgctgggtttccaaaggttttagagctagaaatagcaagttaaaataaggctagtccgttatcaacttgaaaaagtggcaccgagtcggtgcatgggatcaggcttccactttggaaacccagcaaaacattgacgcgtctctacgtgggggcgcgtttt

SEQ ID NO: 1450 - RNA, 164 nt, synthetic construct
  source 1..164: mol_type = other RNA
gtcttgctgggtttccaaaggttttagagctagaaatagcaagttaaaataaggctagtccgttatcaacttgaaaaagtggcaccgagtcggtgcgtatgggatcaggcttccactttggaaacccagcaacattgacgcgtctctacgtgggggcgcgtttt

SEQ ID NO: 1451 - RNA, 165 nt, synthetic construct
  source 1..165: mol_type = other RNA
gtcttgctgggtttccaaaggttttagagctagaaatagcaagttaaaataaggctagtccgttatcaacttgaaaaagtggcaccgagtcggtgctctgtatgggatcaggcttccactttggaaacccaaacattgacgcgtctctacgtgggggcgcgtttt

SEQ ID NO: 1452 - RNA, 165 nt, synthetic construct
  source 1..165: mol_type = other RNA
gtcttgctgggtttccaaaggttttagagctagaaatagcaagttaaaataaggctagtccgttatcaacttgaaaaagtggcaccgagtcggtgctttctgtatgggatcaggcttccactttggaaaccaacattgacgcgtctctacgtgggggcgcgtttt

SEQ ID NO: 1453 - RNA, 166 nt, synthetic construct
  source 1..166: mol_type = other RNA
gtcttgctgggtttccaaaggttttagagctagaaatagcaagttaaaataaggctagtccgttatcaacttgaaaaagtggcaccgagtcggtgcgtatgggatcaggcttccactttggaaacccagcaaaacattgacgcgtctctacgtgggggcgcgtttt

SEQ ID NO: 1454 - RNA, 167 nt, synthetic construct
  source 1..167: mol_type = other RNA
gtcttgctgggtttccaaaggttttagagctagaaatagcaagttaaaataaggctagtccgttatcaacttgaaaaagtggcaccgagtcggtgctctgtatgggatcaggcttccactttggaaacccagcaacattgacgcgtctctacgtgggggcgcgtttt

SEQ ID NO: 1455 - RNA, 167 nt, synthetic construct
  source 1..167: mol_type = other RNA
gtcttgctgggtttccaaaggttttagagctagaaatagcaagttaaaataaggctagtccgttatcaacttgaaaaagtggcaccgagtcggtgctttctgtatgggatcaggcttccactttggaaacccaaacattgacgcgtctctacgtgggggcgcgtttt

SEQ ID NO: 1456 - RNA, 167 nt, synthetic construct
  source 1..167: mol_type = other RNA
gtcttgctgggtttccaaaggttttagagctagaaatagcaagttaaaataaggctagtccgttatcaacttgaaaaagtggcaccgagtcggtgcgctttctgtatgggatcaggcttccactttggaaaccaacattgacgcgtctctacgtgggggcgcgtttt

SEQ ID NO: 1457 - RNA, 169 nt, synthetic construct
  source 1..169: mol_type = other RNA
gtcttgctgggtttccaaaggttttagagctagaaatagcaagttaaaataaggctagtccgttatcaacttgaaaaagtggcaccgagtcggtgctctgtatgggatcaggcttccactttggaaacccagcaaaacattgacgcgtctctacgtgggggcgcgtttt

SEQ ID NO: 1458 - RNA, 169 nt, synthetic construct
  source 1..169: mol_type = other RNA
gtcttgctgggtttccaaaggttttagagctagaaatagcaagttaaaataaggctagtccgttatcaacttgaaaaagtggcaccgagtcggtgctttctgtatgggatcaggcttccactttggaaacccagcaacattgacgcgtctctacgtgggggcgcgtttt

SEQ ID NO: 1459 - RNA, 169 nt, synthetic construct
  source 1..169: mol_type = other RNA
gtcttgctgggtttccaaaggttttagagctagaaatagcaagttaaaataaggctagtccgttatcaacttgaaaaagtggcaccgagtcggtgcgctttctgtatgggatcaggcttccactttggaaacccaaacattgacgcgtctctacgtgggggcgcgtttt

SEQ ID NO: 1460 - RNA, 171 nt, synthetic construct
  source 1..171: mol_type = other RNA
gtcttgctgggtttccaaaggttttagagctagaaatagcaagttaaaataaggctagtccgttatcaacttgaaaaagtggcaccgagtcggtgctttctgtatgggatcaggcttccactttggaaacccagcaaaacattgacgcgtctctacgtgggggcgcgtttt

SEQ ID NO: 1461 - RNA, 171 nt, synthetic construct
  source 1..171: mol_type = other RNA
gtcttgctgggtttccaaaggttttagagctagaaatagcaagttaaaataaggctagtccgttatcaacttgaaaaagtggcaccgagtcggtgcgctttctgtatgggatcaggcttccactttggaaacccagcaacattgacgcgtctctacgtgggggcgcgtttt

SEQ ID NO: 1462 - RNA, 173 nt, synthetic construct
  source 1..173: mol_type = other RNA
gtcttgctgggtttccaaaggttttagagctagaaatagcaagttaaaataaggctagtccgttatcaacttgaaaaagtggcaccgagtcggtgcgctttctgtatgggatcaggcttccactttggaaacccagcaaaacattgacgcgtctctacgtgggggcgcgtttt

SEQ ID NO: 1463 - RNA, 17 nt, synthetic construct
  source 1..17: mol_type = other RNA
aagacaggtgtcttgct

SEQ ID NO: 1464 - RNA, 18 nt, synthetic construct
  source 1..18: mol_type = other RNA
gaagacaggtgtcttgct

SEQ ID NO: 1465 - RNA, 19 nt, synthetic construct
  source 1..19: mol_type = other RNA
tgaagacaggtgtcttgct

SEQ ID NO: 1466 - RNA, 21 nt, synthetic construct
  source 1..21: mol_type = other RNA
cgtgaagacaggtgtcttgct

SEQ ID NO: 1467 - RNA, 22 nt, synthetic construct
  source 1..22: mol_type = other RNA
acgtgaagacaggtgtcttgct

SEQ ID NO: 1468-1472 - skipped (5 entries)

SEQ ID NO: 1473 - RNA, 10 nt, synthetic construct
  source 1..10: mol_type = other RNA
aagacacctg

SEQ ID NO: 1474 - RNA, 11 nt, synthetic construct
  source 1..11: mol_type = other RNA
aagacacctgt

SEQ ID NO: 1475 - RNA, 12 nt, synthetic construct
  source 1..12: mol_type = other RNA
aagacacctgtc

SEQ ID NO: 1476 - RNA, 13 nt, synthetic construct
  source 1..13: mol_type = other RNA
aagacacctgtct

SEQ ID NO: 1477 - RNA, 14 nt, synthetic construct
  source 1..14: mol_type = other RNA
aagacacctgtctt

SEQ ID NO: 1478 - RNA, 15 nt, synthetic construct
  source 1..15: mol_type = other RNA
aagacacctgtcttc

SEQ ID NO: 1479 - RNA, 16 nt, synthetic construct
  source 1..16: mol_type = other RNA
aagacacctgtcttca

SEQ ID NO: 1480 - RNA, 17 nt, synthetic construct
  source 1..17: mol_type = other RNA
aagacacctgtcttcac

SEQ ID NO: 1481 - RNA, 18 nt, synthetic construct
  source 1..18: mol_type = other RNA
aagacacctgtcttcacg

SEQ ID NO: 1482 - RNA, 19 nt, synthetic construct
  source 1..19: mol_type = other RNA
aagacacctgtcttcacgt

SEQ ID NO: 1483 - RNA, 28 nt, synthetic construct
  source 1..28: mol_type = other RNA
gatcaggcttccactttggaaacacagc

SEQ ID NO: 1484 - RNA, 28 nt, synthetic construct
  source 1..28: mol_type = other RNA
gatcaggcttccactttggaaacccagc

SEQ ID NO: 1485 - RNA, 28 nt, synthetic construct
  source 1..28: mol_type = other RNA
gatcaggcttccactttggaaacgcagc

SEQ ID NO: 1486 - RNA, 28 nt, synthetic construct
  source 1..28: mol_type = other RNA
gatcaggcttccactttggaaactcagc

SEQ ID NO: 1487 - RNA, 29 nt, synthetic construct
  source 1..29: mol_type = other RNA
ggatcaggcttccactttggaaacacagc

SEQ ID NO: 1488 - RNA, 29 nt, synthetic construct
  source 1..29: mol_type = other RNA
ggatcaggcttccactttggaaacccagc

SEQ ID NO: 1489 - RNA, 29 nt, synthetic construct
  source 1..29: mol_type = other RNA
ggatcaggcttccactttggaaacgcagc

SEQ ID NO: 1490 - RNA, 29 nt, synthetic construct
  source 1..29: mol_type = other RNA
ggatcaggcttccactttggaaactcagc

SEQ ID NO: 1491 - RNA, 30 nt, synthetic construct
  source 1..30: mol_type = other RNA
gggatcaggcttccactttggaaacacagc

SEQ ID NO: 1492 - RNA, 30 nt, synthetic construct
  source 1..30: mol_type = other RNA
gggatcaggcttccactttggaaacccagc

SEQ ID NO: 1493 - RNA, 30 nt, synthetic construct
  source 1..30: mol_type = other RNA
gggatcaggcttccactttggaaacgcagc

SEQ ID NO: 1494 - RNA, 30 nt, synthetic construct
  source 1..30: mol_type = other RNA
gggatcaggcttccactttggaaactcagc

SEQ ID NO: 1495 - RNA, 31 nt, synthetic construct
  source 1..31: mol_type = other RNA
tgggatcaggcttccactttggaaacacagc

SEQ ID NO: 1496 - RNA, 31 nt, synthetic construct
  source 1..31: mol_type = other RNA
tgggatcaggcttccactttggaaacccagc

SEQ ID NO: 1497 - RNA, 31 nt, synthetic construct
  source 1..31: mol_type = other RNA
tgggatcaggcttccactttggaaacgcagc

SEQ ID NO: 1498 - RNA, 31 nt, synthetic construct
  source 1..31: mol_type = other RNA
tgggatcaggcttccactttggaaactcagc

SEQ ID NO: 1499 - RNA, 32 nt, synthetic construct
  source 1..32: mol_type = other RNA
atgggatcaggcttccactttggaaacacagc

SEQ ID NO: 1500 - RNA, 32 nt, synthetic construct
  source 1..32: mol_type = other RNA
atgggatcaggcttccactttggaaacccagc

SEQ ID NO: 1501 - RNA, 32 nt, synthetic construct
  source 1..32: mol_type = other RNA
atgggatcaggcttccactttggaaacgcagc

SEQ ID NO: 1502 - RNA, 32 nt, synthetic construct
  source 1..32: mol_type = other RNA
atgggatcaggcttccactttggaaactcagc

SEQ ID NO: 1503 - RNA, 33 nt, synthetic construct
  source 1..33: mol_type = other RNA
tatgggatcaggcttccactttggaaacacagc

SEQ ID NO: 1504 - RNA, 33 nt, synthetic construct
  source 1..33: mol_type = other RNA
tatgggatcaggcttccactttggaaacccagc

SEQ ID NO: 1505 - RNA, 33 nt, synthetic construct
  source 1..33: mol_type = other RNA
tatgggatcaggcttccactttggaaacgcagc

SEQ ID NO: 1506 - RNA, 33 nt, synthetic construct
  source 1..33: mol_type = other RNA
tatgggatcaggcttccactttggaaactcagc

SEQ ID NO: 1507 - RNA, 34 nt, synthetic construct
  source 1..34: mol_type = other RNA
gtatgggatcaggcttccactttggaaacacagc

SEQ ID NO: 1508 - RNA, 34 nt, synthetic construct
  source 1..34: mol_type = other RNA
gtatgggatcaggcttccactttggaaacccagc

SEQ ID NO: 1509 - RNA, 34 nt, synthetic construct
  source 1..34: mol_type = other RNA
gtatgggatcaggcttccactttggaaacgcagc

SEQ ID NO: 1510 - RNA, 34 nt, synthetic construct
  source 1..34: mol_type = other RNA
gtatgggatcaggcttccactttggaaactcagc

SEQ ID NO: 1511 - RNA, 35 nt, synthetic construct
  source 1..35: mol_type = other RNA
tgtatgggatcaggcttccactttggaaacacagc

SEQ ID NO: 1512 - RNA, 35 nt, synthetic construct
  source 1..35: mol_type = other RNA
tgtatgggatcaggcttccactttggaaacccagc

SEQ ID NO: 1513 - RNA, 35 nt, synthetic construct
  source 1..35: mol_type = other RNA
tgtatgggatcaggcttccactttggaaacgcagc

SEQ ID NO: 1514 - RNA, 35 nt, synthetic construct
  source 1..35: mol_type = other RNA
tgtatgggatcaggcttccactttggaaactcagc

SEQ ID NO: 1515 - RNA, 36 nt, synthetic construct
  source 1..36: mol_type = other RNA
ctgtatgggatcaggcttccactttggaaacacagc

SEQ ID NO: 1516 - RNA, 36 nt, synthetic construct
  source 1..36: mol_type = other RNA
ctgtatgggatcaggcttccactttggaaacccagc

SEQ ID NO: 1517 - RNA, 36 nt, synthetic construct
  source 1..36: mol_type = other RNA
ctgtatgggatcaggcttccactttggaaacgcagc

SEQ ID NO: 1518 - RNA, 36 nt, synthetic construct
  source 1..36: mol_type = other RNA
ctgtatgggatcaggcttccactttggaaactcagc

SEQ ID NO: 1519 - RNA, 37 nt, synthetic construct
  source 1..37: mol_type = other RNA
tctgtatgggatcaggcttccactttggaaacacagc

SEQ ID NO: 1520 - RNA, 37 nt, synthetic construct
  source 1..37: mol_type = other RNA
tctgtatgggatcaggcttccactttggaaacccagc

SEQ ID NO: 1521 - RNA, 37 nt, synthetic construct
  source 1..37: mol_type = other RNA
tctgtatgggatcaggcttccactttggaaacgcagc

SEQ ID NO: 1522 - RNA, 37 nt, synthetic construct
  source 1..37: mol_type = other RNA
tctgtatgggatcaggcttccactttggaaactcagc

SEQ ID NO: 1523 - RNA, 38 nt, synthetic construct
  source 1..38: mol_type = other RNA
ttctgtatgggatcaggcttccactttggaaacacagc

SEQ ID NO: 1524 - RNA, 38 nt, synthetic construct
  source 1..38: mol_type = other RNA
ttctgtatgggatcaggcttccactttggaaacccagc

SEQ ID NO: 1525 - RNA, 38 nt, synthetic construct
  source 1..38: mol_type = other RNA
ttctgtatgggatcaggcttccactttggaaacgcagc

SEQ ID NO: 1526 - RNA, 38 nt, synthetic construct
  source 1..38: mol_type = other RNA
ttctgtatgggatcaggcttccactttggaaactcagc

SEQ ID NO: 1527 - RNA, 39 nt, synthetic construct
  source 1..39: mol_type = other RNA
tttctgtatgggatcaggcttccactttggaaacacagc

SEQ ID NO: 1528 - RNA, 39 nt, synthetic construct
  source 1..39: mol_type = other RNA
tttctgtatgggatcaggcttccactttggaaacccagc

SEQ ID NO: 1529 - RNA, 39 nt, synthetic construct
  source 1..39: mol_type = other RNA
tttctgtatgggatcaggcttccactttggaaacgcagc

SEQ ID NO: 1530 - RNA, 39 nt, synthetic construct
  source 1..39: mol_type = other RNA
tttctgtatgggatcaggcttccactttggaaactcagc

SEQ ID NO: 1531 - RNA, 40 nt, synthetic construct
  source 1..40: mol_type = other RNA
ctttctgtatgggatcaggcttccactttggaaacacagc

SEQ ID NO: 1532 - RNA, 40 nt, synthetic construct
  source 1..40: mol_type = other RNA
ctttctgtatgggatcaggcttccactttggaaacccagc

SEQ ID NO: 1533 - RNA, 40 nt, synthetic construct
  source 1..40: mol_type = other RNA
ctttctgtatgggatcaggcttccactttggaaacgcagc

SEQ ID NO: 1534 - RNA, 40 nt, synthetic construct
  source 1..40: mol_type = other RNA
ctttctgtatgggatcaggcttccactttggaaactcagc

SEQ ID NO: 1535 - RNA, 20 nt, synthetic construct
  source 1..20: mol_type = other RNA
ggcttccactttggaaacac

SEQ ID NO: 1536 - RNA, 20 nt, synthetic construct
  source 1..20: mol_type = other RNA
ggcttccactttggaaacgc

SEQ ID NO: 1537 - RNA, 20 nt, synthetic construct
  source 1..20: mol_type = other RNA
ggcttccactttggaaactc

SEQ ID NO: 1538 - RNA, 20 nt, synthetic construct
  source 1..20: mol_type = other RNA
tccactttggaaacacagca

SEQ ID NO: 1539 - RNA, 20 nt, synthetic construct
  source 1..20: mol_type = other RNA
tccactttggaaacgcagca

SEQ ID NO: 1540 - RNA, 20 nt, synthetic construct
  source 1..20: mol_type = other RNA
tccactttggaaactcagca

SEQ ID NO: 1541 - RNA, 136 nt, synthetic construct
  source 1..136: mol_type = other RNA
gtgaagacaggtgtcttgctgttttagagctagaaatagcaagttaaaataaggctagtccgttatcaacttgaaaaagtggcaccgagtcggtgcatgggatcaggcttccactttggaaacccagcaagacacc

SEQ ID NO: 1542 - RNA, 138 nt, synthetic construct
  source 1..138: mol_type = other RNA
gtgaagacaggtgtcttgctgttttagagctagaaatagcaagttaaaataaggctagtccgttatcaacttgaaaaagtggcaccgagtcggtgcatgggatcaggcttccactttggaaacccagcaagacacctg

SEQ ID NO: 1543 - RNA, 138 nt, synthetic construct
  source 1..138: mol_type = other RNA
gtgaagacaggtgtcttgctgttttagagctagaaatagcaagttaaaataaggctagtccgttatcaacttgaaaaagtggcaccgagtcggtgcgtatgggatcaggcttccactttggaaacccagcaagacacc

SEQ ID NO: 1544 - RNA, 140 nt, synthetic construct
  source 1..140: mol_type = other RNA
gtgaagacaggtgtcttgctgttttagagctagaaatagcaagttaaaataaggctagtccgttatcaacttgaaaaagtggcaccgagtcggtgcatgggatcaggcttccactttggaaacccagcaagacacctgtc

SEQ ID NO: 1545 - RNA, 140 nt, synthetic construct
  source 1..140: mol_type = other RNA
gtgaagacaggtgtcttgctgttttagagctagaaatagcaagttaaaataaggctagtccgttatcaacttgaaaaagtggcaccgagtcggtgcgtatgggatcaggcttccactttggaaacccagcaagacacctg

SEQ ID NO: 1546 - RNA, 140 nt, synthetic construct
  source 1..140: mol_type = other RNA
gtgaagacaggtgtcttgctgttttagagctagaaatagcaagttaaaataaggctagtccgttatcaacttgaaaaagtggcaccgagtcggtgcatgggatcaggcttccactttggaaacccagcaagacacctttt

SEQ ID NO: 1547 - RNA, 141 nt, synthetic construct
  source 1..141: mol_type = other RNA
gtgaagacaggtgtcttgctgttttagagctagaaatagcaagttaaaataaggctagtccgttatcaacttgaaaaagtggcaccgagtcggtgctctgtatgggatcaggcttccactttggaaacccagcaagacacc

SEQ ID NO: 1548 - RNA, 142 nt, synthetic construct
  source 1..142: mol_type = other RNA
gtgaagacaggtgtcttgctgttttagagctagaaatagcaagttaaaataaggctagtccgttatcaacttgaaaaagtggcaccgagtcggtgcatgggatcaggcttccactttggaaacccagcaagacacctgtctt

SEQ ID NO: 1549 - RNA, 142 nt, synthetic construct
  source 1..142: mol_type = other RNA
gtgaagacaggtgtcttgctgttttagagctagaaatagcaagttaaaataaggctagtccgttatcaacttgaaaaagtggcaccgagtcggtgcgtatgggatcaggcttccactttggaaacccagcaagacacctgtc

SEQ ID NO: 1550 - RNA, 142 nt, synthetic construct
  source 1..142: mol_type = other RNA
gtgaagacaggtgtcttgctgttttagagctagaaatagcaagttaaaataaggctagtccgttatcaacttgaaaaagtggcaccgagtcggtgcatgggatcaggcttccactttggaaacccagcaagacacctgtttt

SEQ ID NO: 1551 - RNA, 142 nt, synthetic construct
  source 1..142: mol_type = other RNA
gtgaagacaggtgtcttgctgttttagagctagaaatagcaagttaaaataaggctagtccgttatcaacttgaaaaagtggcaccgagtcggtgcgtatgggatcaggcttccactttggaaacccagcaagacacctttt

SEQ ID NO: 1552 - RNA, 143 nt, synthetic construct
  source 1..143: mol_type = other RNA
gtgaagacaggtgtcttgctgttttagagctagaaatagcaagttaaaataaggctagtccgttatcaacttgaaaaagtggcaccgagtcggtgcgtatgggatcaggcttccactttggaaacccagcaagacacctgtct

SEQ ID NO: 1553 - RNA, 143 nt, synthetic construct
  source 1..143: mol_type = other RNA
gtgaagacaggtgtcttgctgttttagagctagaaatagcaagttaaaataaggctagtccgttatcaacttgaaaaagtggcaccgagtcggtgctctgtatgggatcaggcttccactttggaaacccagcaagacacctg

SEQ ID NO: 1554 - RNA, 143 nt, synthetic construct
  source 1..143: mol_type = other RNA
gtgaagacaggtgtcttgctgttttagagctagaaatagcaagttaaaataaggctagtccgttatcaacttgaaaaagtggcaccgagtcggtgctttctgtatgggatcaggcttccactttggaaacccagcaagacacc

SEQ ID NO: 1555 - RNA, 144 nt, synthetic construct
  source 1..144: mol_type = other RNA
gtgaagacaggtgtcttgctgttttagagctagaaatagcaagttaaaataaggctagtccgttatcaacttgaaaaagtggcaccgagtcggtgcatgggatcaggcttccactttggaaacccagcaagacacctgtctttt

SEQ ID NO: 1556 - RNA, 144 nt, synthetic construct
  source 1..144: mol_type = other RNA
gtgaagacaggtgtcttgctgttttagagctagaaatagcaagttaaaataaggctagtccgttatcaacttgaaaaagtggcaccgagtcggtgcgtatgggatcaggcttccactttggaaacccagcaagacacctgtttt

SEQ ID NO: 1557 - RNA, 145 nt, synthetic construct
  source 1..145: mol_type = other RNA
gtgaagacaggtgtcttgctgttttagagctagaaatagcaagttaaaataaggctagtccgttatcaacttgaaaaagtggcaccgagtcggtgctctgtatgggatcaggcttccactttggaaacccagcaagacacctgtc

SEQ ID NO: 1558 - RNA, 145 nt, synthetic construct
  source 1..145: mol_type = other RNA
gtgaagacaggtgtcttgctgttttagagctagaaatagcaagttaaaataaggctagtccgttatcaacttgaaaaagtggcaccgagtcggtgctttctgtatgggatcaggcttccactttggaaacccagcaagacacctg

SEQ ID NO: 1559 - RNA, 145 nt, synthetic construct
  source 1..145: mol_type = other RNA
gtgaagacaggtgtcttgctgttttagagctagaaatagcaagttaaaataaggctagtccgttatcaacttgaaaaagtggcaccgagtcggtgctctgtatgggatcaggcttccactttggaaacccagcaagacacctttt

SEQ ID NO: 1560 - RNA, 146 nt, synthetic construct
  source 1..146: mol_type = other RNA
gtgaagacaggtgtcttgctgttttagagctagaaatagcaagttaaaataaggctagtccgttatcaacttgaaaaagtggcaccgagtcggtgcatgggatcaggcttccactttggaaacccagcaagacacctgtctttttt

SEQ ID NO: 1561 - RNA, 146 nt, synthetic construct
  source 1..146: mol_type = other RNA
gtgaagacaggtgtcttgctgttttagagctagaaatagcaagttaaaataaggctagtccgttatcaacttgaaaaagtggcaccgagtcggtgcgtatgggatcaggcttccactttggaaacccagcaagacacctgtctttt

SEQ ID NO: 1562 - RNA, 147 nt, synthetic construct
  source 1..147: mol_type = other RNA
gtgaagacaggtgtcttgctgttttagagctagaaatagcaagttaaaataaggctagtccgttatcaacttgaaaaagtggcaccgagtcggtgctctgtatgggatcaggcttccactttggaaacccagcaagacacctgtctt

SEQ ID NO: 1563 - RNA, 147 nt, synthetic construct
  source 1..147: mol_type = other RNA
gtgaagacaggtgtcttgctgttttagagctagaaatagcaagttaaaataaggctagtccgttatcaacttgaaaaagtggcaccgagtcggtgctttctgtatgggatcaggcttccactttggaaacccagcaagacacctgtc

SEQ ID NO: 1564 - RNA, 147 nt, synthetic construct
  source 1..147: mol_type = other RNA
gtgaagacaggtgtcttgctgttttagagctagaaatagcaagttaaaataaggctagtccgttatcaacttgaaaaagtggcaccgagtcggtgcgtatgggatcaggcttccactttggaaacccagcaagacacctgtcttttt

SEQ ID NO: 1565 - RNA, 147 nt, synthetic construct
  source 1..147: mol_type = other RNA
gtgaagacaggtgtcttgctgttttagagctagaaatagcaagttaaaataaggctagtccgttatcaacttgaaaaagtggcaccgagtcggtgctctgtatgggatcaggcttccactttggaaacccagcaagacacctgtttt

SEQ ID NO: 1566 - RNA, 147 nt, synthetic construct
  source 1..147: mol_type = other RNA
gtgaagacaggtgtcttgctgttttagagctagaaatagcaagttaaaataaggctagtccgttatcaacttgaaaaagtggcaccgagtcggtgctttctgtatgggatcaggcttccactttggaaacccagcaagacacctttt

SEQ ID NO: 1567 - RNA, 149 nt, synthetic construct
  source 1..149: mol_type = other RNA
gtgaagacaggtgtcttgctgttttagagctagaaatagcaagttaaaataaggctagtccgttatcaacttgaaaaagtggcaccgagtcggtgctttctgtatgggatcaggcttccactttggaaacccagcaagacacctgtctt

SEQ ID NO: 1568 - RNA, 149 nt, synthetic construct
  source 1..149: mol_type = other RNA
gtgaagacaggtgtcttgctgttttagagctagaaatagcaagttaaaataaggctagtccgttatcaacttgaaaaagtggcaccgagtcggtgctctgtatgggatcaggcttccactttggaaacccagcaagacacctgtctttt

SEQ ID NO: 1569 - RNA, 149 nt, synthetic construct
  source 1..149: mol_type = other RNA
gtgaagacaggtgtcttgctgttttagagctagaaatagcaagttaaaataaggctagtccgttatcaacttgaaaaagtggcaccgagtcggtgctttctgtatgggatcaggcttccactttggaaacccagcaagacacctgtttt

SEQ ID NO: 1570 - RNA, 151 nt, synthetic construct
  source 1..151: mol_type = other RNA
gtgaagacaggtgtcttgctgttttagagctagaaatagcaagttaaaataaggctagtccgttatcaacttgaaaaagtggcaccgagtcggtgctctgtatgggatcaggcttccactttggaaacccagcaagacacctgtctttttt

SEQ ID NO: 1571 - RNA, 151 nt, synthetic construct
  source 1..151: mol_type = other RNA
gtgaagacaggtgtcttgctgttttagagctagaaatagcaagttaaaataaggctagtccgttatcaacttgaaaaagtggcaccgagtcggtgctttctgtatgggatcaggcttccactttggaaacccagcaagacacctgtctttt

SEQ ID NO: 1572 - RNA, 153 nt, synthetic construct
  source 1..153: mol_type = other RNA
gtgaagacaggtgtcttgctgttttagagctagaaatagcaagttaaaataaggctagtccgttatcaacttgaaaaagtggcaccgagtcggtgctttctgtatgggatcaggcttccactttggaaacccagcaagacacctgtctttttt

SEQ ID NO: 1573 - RNA, 170 nt, synthetic construct
  source 1..170: mol_type = other RNA
gtgaagacaggtgtcttgctgttttagagctagaaatagcaagttaaaataaggctagtccgttatcaacttgaaaaagtggcaccgagtcggtgcatgggatcaggcttccactttggaaacccagcaagacaccaacattgacgcgtctctacgtgggggcgcgtttt

SEQ ID NO: 1574 - RNA, 172 nt, synthetic construct
  source 1..172: mol_type = other RNA
gtgaagacaggtgtcttgctgttttagagctagaaatagcaagttaaaataaggctagtccgttatcaacttgaaaaagtggcaccgagtcggtgcatgggatcaggcttccactttggaaacccagcaagacacctgaacattgacgcgtctctacgtgggggcgcgtttt

SEQ ID NO: 1575 - RNA, 172 nt, synthetic construct
  source 1..172: mol_type = other RNA
gtgaagacaggtgtcttgctgttttagagctagaaatagcaagttaaaataaggctagtccgttatcaacttgaaaaagtggcaccgagtcggtgcgtatgggatcaggcttccactttggaaacccagcaagacaccaacattgacgcgtctctacgtgggggcgcgtttt

SEQ ID NO: 1576 - RNA, 174 nt, synthetic construct
  source 1..174: mol_type = other RNA
gtgaagacaggtgtcttgctgttttagagctagaaatagcaagttaaaataaggctagtccgttatcaacttgaaaaagtggcaccgagtcggtgcatgggatcaggcttccactttggaaacccagcaagacacctgtcaacattgacgcgtctctacgtgggggcgcgtttt

SEQ ID NO: 1577 - RNA, 174 nt, synthetic construct
  source 1..174: mol_type = other RNA
gtgaagacaggtgtcttgctgttttagagctagaaatagcaagttaaaataaggctagtccgttatcaacttgaaaaagtggcaccgagtcggtgcgtatgggatcaggcttccactttggaaacccagcaagacacctgaacattgacgcgtctctacgtgggggcgcgtttt

SEQ ID NO: 1578 - RNA, 175 nt, synthetic construct
  source 1..175: mol_type = other RNA
gtgaagacaggtgtcttgctgttttagagctagaaatagcaagttaaaataaggctagtccgttatcaacttgaaaaagtggcaccgagtcggtgctctgtatgggatcaggcttccactttggaaacccagcaagacaccaacattgacgcgtctctacgtgggggcgcgtttt

SEQ ID NO: 1579 - RNA, 176 nt, synthetic construct
  source 1..176: mol_type = other RNA
gtgaagacaggtgtcttgctgttttagagctagaaatagcaagttaaaataaggctagtccgttatcaacttgaaaaagtggcaccgagtcggtgcatgggatcaggcttccactttggaaacccagcaagacacctgtcttaacattgacgcgtctctacgtgggggcgcgtttt

SEQ ID NO: 1580 - RNA, 176 nt, synthetic construct
  source 1..176: mol_type = other RNA
gtgaagacaggtgtcttgctgttttagagctagaaatagcaagttaaaataaggctagtccgttatcaacttgaaaaagtggcaccgagtcggtgcgtatgggatcaggcttccactttggaaacccagcaagacacctgtcaacattgacgcgtctctacgtgggggcgcgtttt

SEQ ID NO: 1581 - RNA, 177 nt, synthetic construct
  source 1..177: mol_type = other RNA
gtgaagacaggtgtcttgctgttttagagctagaaatagcaagttaaaataaggctagtccgttatcaacttgaaaaagtggcaccgagtcggtgcgtatgggatcaggcttccactttggaaacccagcaagacacctgtctaacattgacgcgtctctacgtgggggcgcgtttt

SEQ ID NO: 1582 - RNA, 177 nt, synthetic construct
  source 1..177: mol_type = other RNA
gtgaagacaggtgtcttgctgttttagagctagaaatagcaagttaaaataaggctagtccgttatcaacttgaaaaagtggcaccgagtcggtgctctgtatgggatcaggcttccactttggaaacccagcaagacacctgaacattgacgcgtctctacgtgggggcgcgtttt

SEQ ID NO: 1583 - RNA, 177 nt, synthetic construct
  source 1..177: mol_type = other RNA
gtgaagacaggtgtcttgctgttttagagctagaaatagcaagttaaaataaggctagtccgttatcaacttgaaaaagtggcaccgagtcggtgctttctgtatgggatcaggcttccactttggaaacccagcaagacaccaacattgacgcgtctctacgtgggggcgcgtttt

SEQ ID NO: 1584 - RNA, 179 nt, synthetic construct
  source 1..179: mol_type = other RNA
gtgaagacaggtgtcttgctgttttagagctagaaatagcaagttaaaataaggctagtccgttatcaacttgaaaaagtggcaccgagtcggtgctctgtatgggatcaggcttccactttggaaacccagcaagacacctgtcaacattgacgcgtctctacgtgggggcgcgtttt

SEQ ID NO: 1585 - RNA, 179 nt, synthetic construct
  source 1..179: mol_type = other RNA
gtgaagacaggtgtcttgctgttttagagctagaaatagcaagttaaaataaggctagtccgttatcaacttgaaaaagtggcaccgagtcggtgctttctgtatgggatcaggcttccactttggaaacccagcaagacacctgaacattgacgcgtctctacgtgggggcgcgtttt

SEQ ID NO: 1586 - RNA, 181 nt, synthetic construct
  source 1..181: mol_type = other RNA
gtgaagacaggtgtcttgctgttttagagctagaaatagcaagttaaaataaggctagtccgttatcaacttgaaaaagtggcaccgagtcggtgctctgtatgggatcaggcttccactttggaaacccagcaagacacctgtcttaacattgacgcgtctctacgtgggggcgcgtttt

SEQ ID NO: 1587 - RNA, 181 nt, synthetic construct
  source 1..181: mol_type = other RNA
gtgaagacaggtgtcttgctgttttagagctagaaatagcaagttaaaataaggctagtccgttatcaacttgaaaaagtggcaccgagtcggtgctttctgtatgggatcaggcttccactttggaaacccagcaagacacctgtcaacattgacgcgtctctacgtgggggcgcgtttt

SEQ ID NO: 1588 - RNA, 183 nt, synthetic construct
  source 1..183: mol_type = other RNA
gtgaagacaggtgtcttgctgttttagagctagaaatagcaagttaaaataaggctagtccgttatcaacttgaaaaagtggcaccgagtcggtgctttctgtatgggatcaggcttccactttggaaacccagcaagacacctgtcttaacattgacgcgtctctacgtgggggcgcgtttt

SEQ ID NO: 1589 - RNA, 17 nt, synthetic construct
  source 1..17: mol_type = other RNA
attatcagttttggatg

SEQ ID NO: 1590 - RNA, 18 nt, synthetic construct
  source 1..18: mol_type = other RNA
gattatcagttttggatg

SEQ ID NO: 1591 - RNA, 19 nt, synthetic construct
  source 1..19: mol_type = other RNA
tgattatcagttttggatg

SEQ ID NO: 1592 - RNA, 21 nt, synthetic construct
  source 1..21: mol_type = other RNA
tgtgattatcagttttggatg

SEQ ID NO: 1593 - RNA, 22 nt, synthetic construct
  source 1..22: mol_type = other RNA
ttgtgattatcagttttggatg

SEQ ID NO: 1594-1598 - skipped (5 entries)

SEQ ID NO: 1599 - RNA, 10 nt, synthetic construct
  source 1..10: mol_type = other RNA
ccaaaactga

SEQ ID NO: 1600 - RNA, 11 nt, synthetic construct
  source 1..11: mol_type = other RNA
ccaaaactgat

SEQ ID NO: 1601 - RNA, 12 nt, synthetic construct
  source 1..12: mol_type = other RNA
ccaaaactgata

SEQ ID NO: 1602 - RNA, 13 nt, synthetic construct
  source 1..13: mol_type = other RNA
ccaaaactgataa

SEQ ID NO: 1603 - RNA, 14 nt, synthetic construct
  source 1..14: mol_type = other RNA
ccaaaactgataat

SEQ ID NO: 1604 - RNA, 15 nt, synthetic construct
  source 1..15: mol_type = other RNA
ccaaaactgataatc

SEQ ID NO: 1605 - RNA, 16 nt, synthetic construct
  source 1..16: mol_type = other RNA
ccaaaactgataatca

SEQ ID NO: 1606 - RNA, 17 nt, synthetic construct
  source 1..17: mol_type = other RNA
ccaaaactgataatcac

SEQ ID NO: 1607 - RNA, 18 nt, synthetic construct
  source 1..18: mol_type = other RNA
ccaaaactgataatcaca

SEQ ID NO: 1608 - RNA, 19 nt, synthetic construct
  source 1..19: mol_type = other RNA
ccaaaactgataatcacaa

SEQ ID NO: 1609 - RNA, 22 nt, synthetic construct
  source 1..22: mol_type = other RNA
cccatacagaaagcttctgcat

SEQ ID NO: 1610 - RNA, 22 nt, synthetic construct
  source 1..22: mol_type = other RNA
cccatacagaaagcttttgcat

SEQ ID NO: 1611 - RNA, 23 nt, synthetic construct
  source 1..23: mol_type = other RNA
tcccatacagaaagcttctgcat

SEQ ID NO: 1612 - RNA, 23 nt, synthetic construct
  source 1..23: mol_type = other RNA
tcccatacagaaagcttttgcat

SEQ ID NO: 1613 - RNA, 24 nt, synthetic construct
  source 1..24: mol_type = other RNA
atcccatacagaaagcttctgcat

SEQ ID NO: 1614 - RNA, 24 nt, synthetic construct
  source 1..24: mol_type = other RNA
atcccatacagaaagcttttgcat

SEQ ID NO: 1615 - RNA, 25 nt, synthetic construct
  source 1..25: mol_type = other RNA
gatcccatacagaaagcttctgcat

SEQ ID NO: 1616 - RNA, 25 nt, synthetic construct
  source 1..25: mol_type = other RNA
gatcccatacagaaagcttttgcat

SEQ ID NO: 1617 - RNA, 26 nt, synthetic construct
  source 1..26: mol_type = other RNA
tgatcccatacagaaagcttctgcat

SEQ ID NO: 1618 - RNA, 26 nt, synthetic construct
  source 1..26: mol_type = other RNA
tgatcccatacagaaagcttttgcat

SEQ ID NO: 1619 - RNA, 27 nt, synthetic construct
  source 1..27: mol_type = other RNA
ctgatcccatacagaaagcttctgcat

SEQ ID NO: 1620 - RNA, 27 nt, synthetic construct
  source 1..27: mol_type = other RNA
ctgatcccatacagaaagcttttgcat

SEQ ID NO: 1621 - RNA, 28 nt, synthetic construct
  source 1..28: mol_type = other RNA
cctgatcccatacagaaagcttctgcat

SEQ ID NO: 1622 - RNA, 28 nt, synthetic construct
  source 1..28: mol_type = other RNA
cctgatcccatacagaaagcttttgcat

SEQ ID NO: 1623 - RNA, 29 nt, synthetic construct
  source 1..29: mol_type = other RNA
gcctgatcccatacagaaagcttctgcat

SEQ ID NO: 1624 - RNA, 29 nt, synthetic construct
  source 1..29: mol_type = other RNA
gcctgatcccatacagaaagcttttgcat

SEQ ID NO: 1625 - RNA, 30 nt, synthetic construct
  source 1..30: mol_type = other RNA
agcctgatcccatacagaaagcttctgcat

SEQ ID NO: 1626 - RNA, 30 nt, synthetic construct
  source 1..30: mol_type = other RNA
agcctgatcccatacagaaagcttttgcat

SEQ ID NO: 1627 - RNA, 31 nt, synthetic construct
  source 1..31: mol_type = other RNA
aagcctgatcccatacagaaagcttctgcat

SEQ ID NO: 1628 - RNA, 31 nt, synthetic construct
  source 1..31: mol_type = other RNA
aagcctgatcccatacagaaagcttttgcat

SEQ ID NO: 1629 - RNA, 32 nt, synthetic construct
  source 1..32: mol_type = other RNA
gaagcctgatcccatacagaaagcttctgcat

SEQ ID NO: 1630 - RNA, 32 nt, synthetic construct
  source 1..32: mol_type = other RNA
gaagcctgatcccatacagaaagcttttgcat

SEQ ID NO: 1631 - RNA, 33 nt, synthetic construct
  source 1..33: mol_type = other RNA
ggaagcctgatcccatacagaaagcttctgcat

SEQ ID NO: 1632 - RNA, 33 nt, synthetic construct
  source 1..33: mol_type = other RNA
ggaagcctgatcccatacagaaagcttttgcat

SEQ ID NO: 1633 - RNA, 34 nt, synthetic construct
  source 1..34: mol_type = other RNA
tggaagcctgatcccatacagaaagcttctgcat

SEQ ID NO: 1634 - RNA, 34 nt, synthetic construct
  source 1..34: mol_type = other RNA
tggaagcctgatcccatacagaaagcttttgcat

SEQ ID NO: 1635 - RNA, 35 nt, synthetic construct
  source 1..35: mol_type = other RNA
gtggaagcctgatcccatacagaaagcttctgcat

SEQ ID NO: 1636 - RNA, 35 nt, synthetic construct
  source 1..35: mol_type = other RNA
gtggaagcctgatcccatacagaaagcttttgcat

SEQ ID NO: 1637 - RNA, 36 nt, synthetic construct
  source 1..36: mol_type = other RNA
agtggaagcctgatcccatacagaaagcttctgcat

SEQ ID NO: 1638 - RNA, 36 nt, synthetic construct
  source 1..36: mol_type = other RNA
agtggaagcctgatcccatacagaaagcttttgcat

SEQ ID NO: 1639 - RNA, 37 nt, synthetic construct
  source 1..37: mol_type = other RNA
aagtggaagcctgatcccatacagaaagcttctgcat

SEQ ID NO: 1640 - RNA, 37 nt, synthetic construct
  source 1..37: mol_type = other RNA
aagtggaagcctgatcccatacagaaagcttttgcat

SEQ ID NO: 1641 - RNA, 38 nt, synthetic construct
  source 1..38: mol_type = other RNA
aaagtggaagcctgatcccatacagaaagcttctgcat

SEQ ID NO: 1642 - RNA, 38 nt, synthetic construct
  source 1..38: mol_type = other RNA
aaagtggaagcctgatcccatacagaaagcttttgcat

SEQ ID NO: 1643 - RNA, 39 nt, synthetic construct
  source 1..39: mol_type = other RNA
caaagtggaagcctgatcccatacagaaagcttctgcat

SEQ ID NO: 1644 - RNA, 39 nt, synthetic construct
  source 1..39: mol_type = other RNA
caaagtggaagcctgatcccatacagaaagcttttgcat

SEQ ID NO: 1645 - RNA, 40 nt, synthetic construct
  source 1..40: mol_type = other RNA
ccaaagtggaagcctgatcccatacagaaagcttctgcat

SEQ ID NO: 1646 - RNA, 40 nt, synthetic construct
  source 1..40: mol_type = other RNA
ccaaagtggaagcctgatcccatacagaaagcttttgcat

SEQ ID NO: 1647 - RNA, 17 nt, synthetic construct
  source 1..17: mol_type = other RNA
tcttgctgggtttccaa

SEQ ID NO: 1648 - RNA, 18 nt, synthetic construct
  source 1..18: mol_type = other RNA
gtcttgctgggtttccaa

SEQ ID NO: 1649 - RNA, 19 nt, synthetic construct
  source 1..19: mol_type = other RNA
tgtcttgctgggtttccaa

SEQ ID NO: 1650 - RNA, 21 nt, synthetic construct
  source 1..21: mol_type = other RNA
ggtgtcttgctgggtttccaa

SEQ ID NO: 1651 - RNA, 22 nt, synthetic construct
  source 1..22: mol_type = other RNA
aggtgtcttgctgggtttccaa

SEQ ID NO: 1652-1656 - skipped (5 entries)

SEQ ID NO: 1657 - RNA, 10 nt, synthetic construct
  source 1..10: mol_type = other RNA
gaaacccagc

SEQ ID NO: 1658 - RNA, 11 nt, synthetic construct
  source 1..11: mol_type = other RNA
gaaacccagca

SEQ ID NO: 1659 - RNA, 12 nt, synthetic construct
  source 1..12: mol_type = other RNA
gaaacccagcaa

SEQ ID NO: 1660 - RNA, 13 nt, synthetic construct
  source 1..13: mol_type = other RNA
gaaacccagcaag

SEQ ID NO: 1661 - RNA, 14 nt, synthetic construct
  source 1..14: mol_type = other RNA
gaaacccagcaaga

SEQ ID NO: 1662 - RNA, 15 nt, synthetic construct
  source 1..15: mol_type = other RNA
gaaacccagcaagac

SEQ ID NO: 1663 - RNA, 16 nt, synthetic construct
  source 1..16: mol_type = other RNA
gaaacccagcaagaca

SEQ ID NO: 1664 - RNA, 17 nt, synthetic construct
  source 1..17: mol_type = other RNA
gaaacccagcaagacac

SEQ ID NO: 1665 - RNA, 18 nt, synthetic construct
  source 1..18: mol_type = other RNA
gaaacccagcaagacacc

SEQ ID NO: 1666 - RNA, 19 nt, synthetic construct
  source 1..19: mol_type = other RNA
gaaacccagcaagacacct

SEQ ID NO: 1667 - RNA, 18 nt, synthetic construct
  source 1..18: mol_type = other RNA
gatcaggcttccactttg

SEQ ID NO: 1668 - RNA, 19 nt, synthetic construct
  source 1..19: mol_type = other RNA
ggatcaggcttccactttg

SEQ ID NO: 1669 - RNA, 20 nt, synthetic construct
  source 1..20: mol_type = other RNA
gggatcaggcttccactttg

SEQ ID NO: 1670 - RNA, 21 nt, synthetic construct
  source 1..21: mol_type = other RNA
tgggatcaggcttccactttg

SEQ ID NO: 1671 - RNA, 22 nt, synthetic construct
  source 1..22: mol_type = other RNA
atgggatcaggcttccactttg

SEQ ID NO: 1672 - RNA, 23 nt, synthetic construct
  source 1..23: mol_type = other RNA
tatgggatcaggcttccactttg

SEQ ID NO: 1673 - RNA, 24 nt, synthetic construct
  source 1..24: mol_type = other RNA
gtatgggatcaggcttccactttg

SEQ ID NO: 1674 - RNA, 25 nt, synthetic construct
  source 1..25: mol_type = other RNA
tgtatgggatcaggcttccactttg

SEQ ID NO: 1675 - RNA, 26 nt, synthetic construct
  source 1..26: mol_type = other RNA
ctgtatgggatcaggcttccactttg

SEQ ID NO: 1676 - RNA, 27 nt, synthetic construct
  source 1..27: mol_type = other RNA
tctgtatgggatcaggcttccactttg

SEQ ID NO: 1677 - RNA, 28 nt, synthetic construct
  source 1..28: mol_type = other RNA
ttctgtatgggatcaggcttccactttg

SEQ ID NO: 1678 - RNA, 29 nt, synthetic construct
  source 1..29: mol_type = other RNA
tttctgtatgggatcaggcttccactttg

SEQ ID NO: 1679 - RNA, 30 nt, synthetic construct
  source 1..30: mol_type = other RNA
ctttctgtatgggatcaggcttccactttg

SEQ ID NO: 1680 - RNA, 31 nt, synthetic construct
  source 1..31: mol_type = other RNA
gctttctgtatgggatcaggcttccactttg

SEQ ID NO: 1681 - RNA, 32 nt, synthetic construct
  source 1..32: mol_type = other RNA
agctttctgtatgggatcaggcttccactttg

SEQ ID NO: 1682 - RNA, 33 nt, synthetic construct
  source 1..33: mol_type = other RNA
aagctttctgtatgggatcaggcttccactttg

SEQ ID NO: 1683 - RNA, 34 nt, synthetic construct
  source 1..34: mol_type = other RNA
gaagctttctgtatgggatcaggcttccactttg

SEQ ID NO: 1684 - RNA, 35 nt, synthetic construct
  source 1..35: mol_type = other RNA
agaagctttctgtatgggatcaggcttccactttg

SEQ ID NO: 1685 - RNA, 36 nt, synthetic construct
  source 1..36: mol_type = other RNA
cagaagctttctgtatgggatcaggcttccactttg

SEQ ID NO: 1686 - RNA, 37 nt, synthetic construct
  source 1..37: mol_type = other RNA
gcagaagctttctgtatgggatcaggcttccactttg

SEQ ID NO: 1687 - RNA, 38 nt, synthetic construct
  source 1..38: mol_type = other RNA
tgcagaagctttctgtatgggatcaggcttccactttg

SEQ ID NO: 1688 - RNA, 39 nt, synthetic construct
  source 1..39: mol_type = other RNA
atgcagaagctttctgtatgggatcaggcttccactttg

SEQ ID NO: 1689 - RNA, 40 nt, synthetic construct
  source 1..40: mol_type = other RNA
gatgcagaagctttctgtatgggatcaggcttccactttg

SEQ ID NO: 1690 - RNA, 17 nt, synthetic construct
  source 1..17: mol_type = other RNA
atctttcttgtgattat

SEQ ID NO: 1691 - RNA, 18 nt, synthetic construct
  source 1..18: mol_type = other RNA
gatctttcttgtgattat

SEQ ID NO: 1692 - RNA, 19 nt, synthetic construct
  source 1..19: mol_type = other RNA
agatctttcttgtgattat

SEQ ID NO: 1693 - RNA, 21 nt, synthetic construct
  source 1..21: mol_type = other RNA
gtagatctttcttgtgattat

SEQ ID NO: 1694 - RNA, 22 nt, synthetic construct
  source 1..22: mol_type = other RNA
agtagatctttcttgtgattat

SEQ ID NO: 1695-1699 - skipped (5 entries)

SEQ ID NO: 1700 - RNA, 10 nt, synthetic construct
  source 1..10: mol_type = other RNA
atcacaagaa

SEQ ID NO: 1701 - RNA, 11 nt, synthetic construct
  source 1..11: mol_type = other RNA
atcacaagaaa

SEQ ID NO: 1702 - RNA, 12 nt, synthetic construct
  source 1..12: mol_type = other RNA
atcacaagaaag

SEQ ID NO: 1703 - RNA, 13 nt, synthetic construct
  source 1..13: mol_type = other RNA
atcacaagaaaga

SEQ ID NO: 1704 - RNA, 14 nt, synthetic construct
  source 1..14: mol_type = other RNA
atcacaagaaagat

SEQ ID NO: 1705 - RNA, 15 nt, synthetic construct
  source 1..15: mol_type = other RNA
atcacaagaaagatc

SEQ ID NO: 1706 - RNA, 16 nt, synthetic construct
  source 1..16: mol_type = other RNA
atcacaagaaagatct

SEQ ID NO: 1707 - RNA, 17 nt, synthetic construct
  source 1..17: mol_type = other RNA
atcacaagaaagatcta

SEQ ID NO: 1708 - RNA, 18 nt, synthetic construct
  source 1..18: mol_type = other RNA
atcacaagaaagatctac

SEQ ID NO: 1709 - RNA, 19 nt, synthetic construct
  source 1..19: mol_type = other RNA
atcacaagaaagatctact

SEQ ID NO: 1710 - RNA, 34 nt, synthetic construct
  source 1..34: mol_type = other RNA
cccatacagaaagcttctgcatccaaaactgata

SEQ ID NO: 1711 - RNA, 34 nt, synthetic construct
  source 1..34: mol_type = other RNA
cccatacagaaagcttctgcatccaaaattgata

SEQ ID NO: 1712 - RNA, 35 nt, synthetic construct
  source 1..35: mol_type = other RNA
tcccatacagaaagcttctgcatccaaaactgata

SEQ ID NO: 1713 - RNA, 35 nt, synthetic construct
  source 1..35: mol_type = other RNA
tcccatacagaaagcttctgcatccaaaattgata

SEQ ID NO: 1714 - RNA, 36 nt, synthetic construct
  source 1..36: mol_type = other RNA
atcccatacagaaagcttctgcatccaaaactgata

SEQ ID NO: 1715 - RNA, 36 nt, synthetic construct
  source 1..36: mol_type = other RNA
atcccatacagaaagcttctgcatccaaaattgata

SEQ ID NO: 1716 - RNA, 37 nt, synthetic construct
  source 1..37: mol_type = other RNA
gatcccatacagaaagcttctgcatccaaaactgata

SEQ ID NO: 1717 - RNA, 37 nt, synthetic construct
  source 1..37: mol_type = other RNA
gatcccatacagaaagcttctgcatccaaaattgata

SEQ ID NO: 1718 - RNA, 38 nt, synthetic construct
  source 1..38: mol_type = other RNA
tgatcccatacagaaagcttctgcatccaaaactgata

SEQ ID NO: 1719 - RNA, 38 nt, synthetic construct
  source 1..38: mol_type = other RNA
tgatcccatacagaaagcttctgcatccaaaattgata

SEQ ID NO: 1720 - RNA, 39 nt, synthetic construct
  source 1..39: mol_type = other RNA
ctgatcccatacagaaagcttctgcatccaaaactgata

SEQ ID NO: 1721 - RNA, 39 nt, synthetic construct
  source 1..39: mol_type = other RNA
ctgatcccatacagaaagcttctgcatccaaaattgata

SEQ ID NO: 1722 - RNA, 40 nt, synthetic construct
  source 1..40: mol_type = other RNA
cctgatcccatacagaaagcttctgcatccaaaactgata

SEQ ID NO: 1723 - RNA, 40 nt, synthetic construct
  source 1..40: mol_type = other RNA
cctgatcccatacagaaagcttctgcatccaaaattgata

SEQ ID NO: 1724 - RNA, 17 nt, synthetic construct
  source 1..17: mol_type = other RNA
tgctgggtttccaaagt

SEQ ID NO: 1725 - RNA, 18 nt, synthetic construct
  source 1..18: mol_type = other RNA
ttgctgggtttccaaagt

SEQ ID NO: 1726 - RNA, 19 nt, synthetic construct
  source 1..19: mol_type = other RNA
cttgctgggtttccaaagt

SEQ ID NO: 1727 - RNA, 21 nt, synthetic construct
  source 1..21: mol_type = other RNA
gtcttgctgggtttccaaagt

SEQ ID NO: 1728 - RNA, 22 nt, synthetic construct
  source 1..22: mol_type = other RNA
tgtcttgctgggtttccaaagt

SEQ ID NO: 1729-1733 - skipped (5 entries)

SEQ ID NO: 1734 - RNA, 10 nt, synthetic construct
  source 1..10: mol_type = other RNA
ttggaaaccc

SEQ ID NO: 1735 - RNA, 11 nt, synthetic construct
  source 1..11: mol_type = other RNA
ttggaaaccca

SEQ ID NO: 1736 - RNA, 12 nt, synthetic construct
  source 1..12: mol_type = other RNA
ttggaaacccag

SEQ ID NO: 1737 - RNA, 13 nt, synthetic construct
  source 1..13: mol_type = other RNA
ttggaaacccagc

SEQ ID NO: 1738 - RNA, 14 nt, synthetic construct
  source 1..14: mol_type = other RNA
ttggaaacccagca

SEQ ID NO: 1739 - RNA, 15 nt, synthetic construct
  source 1..15: mol_type = other RNA
ttggaaacccagcaa

SEQ ID NO: 1740 - RNA, 16 nt, synthetic construct
  source 1..16: mol_type = other RNA
ttggaaacccagcaag

SEQ ID NO: 1741 - RNA, 17 nt, synthetic construct
  source 1..17: mol_type = other RNA
ttggaaacccagcaaga

SEQ ID NO: 1742 - RNA, 18 nt, synthetic construct
  source 1..18: mol_type = other RNA
ttggaaacccagcaagac

SEQ ID NO: 1743 - RNA, 19 nt, synthetic construct
  source 1..19: mol_type = other RNA
ttggaaacccagcaagaca

SEQ ID NO: 1744 - RNA, 15 nt, synthetic construct
  source 1..15: mol_type = other RNA
gatcaggctagcact

SEQ ID NO: 1745 - RNA, 15 nt, synthetic construct
  source 1..15: mol_type = other RNA
gatcaggctagtact

SEQ ID NO: 1746 - RNA, 15 nt, synthetic construct
  source 1..15: mol_type = other RNA
gatcaggcttccact

SEQ ID NO: 1747 - RNA, 16 nt, synthetic construct
  source 1..16: mol_type = other RNA
ggatcaggctagcact

SEQ ID NO: 1748 - RNA, 16 nt, synthetic construct
  source 1..16: mol_type = other RNA
ggatcaggctagtact

SEQ ID NO: 1749 - RNA, 16 nt, synthetic construct
  source 1..16: mol_type = other RNA
ggatcaggcttccact

SEQ ID NO: 1750 - RNA, 17 nt, synthetic construct
  source 1..17: mol_type = other RNA
gggatcaggctagcact

SEQ ID NO: 1751 - RNA, 17 nt, synthetic construct
  source 1..17: mol_type = other RNA
gggatcaggctagtact

SEQ ID NO: 1752 - RNA, 17 nt, synthetic construct
  source 1..17: mol_type = other RNA
gggatcaggcttccact

SEQ ID NO: 1753 - RNA, 18 nt, synthetic construct
  source 1..18: mol_type = other RNA
tgggatcaggctagcact

SEQ ID NO: 1754 - RNA, 18 nt, synthetic construct
  source 1..18: mol_type = other RNA
tgggatcaggctagtact

SEQ ID NO: 1755 - RNA, 18 nt, synthetic construct
  source 1..18: mol_type = other RNA
tgggatcaggcttccact

SEQ ID NO: 1756 - RNA, 19 nt, synthetic construct
  source 1..19: mol_type = other RNA
atgggatcaggctagcact

SEQ ID NO: 1757 - RNA, 19 nt, synthetic construct
  source 1..19: mol_type = other RNA
atgggatcaggctagtact

SEQ ID NO: 1758 - RNA, 19 nt, synthetic construct
  source 1..19: mol_type = other RNA
atgggatcaggcttccact

SEQ ID NO: 1759 - RNA, 20 nt, synthetic construct
  source 1..20: mol_type = other RNA
tatgggatcaggctagcact

SEQ ID NO: 1760 - RNA, 20 nt, synthetic construct
  source 1..20: mol_type = other RNA
tatgggatcaggctagtact

SEQ ID NO: 1761 - RNA, 21 nt, synthetic construct
  source 1..21: mol_type = other RNA
gtatgggatcaggctagcact

SEQ ID NO: 1762 - RNA, 21 nt, synthetic construct
  source 1..21: mol_type = other RNA
gtatgggatcaggctagtact

SEQ ID NO: 1763 - RNA, 21 nt, synthetic construct
  source 1..21: mol_type = other RNA
gtatgggatcaggcttccact

SEQ ID NO: 1764 - RNA, 22 nt, synthetic construct
  source 1..22: mol_type = other RNA
tgtatgggatcaggctagcact

SEQ ID NO: 1765 - RNA, 22 nt, synthetic construct
  source 1..22: mol_type = other RNA
tgtatgggatcaggctagtact

SEQ ID NO: 1766 - RNA, 22 nt, synthetic construct
  source 1..22: mol_type = other RNA
tgtatgggatcaggcttccact

SEQ ID NO: 1767 - RNA, 23 nt, synthetic construct
  source 1..23: mol_type = other RNA
ctgtatgggatcaggctagcact

SEQ ID NO: 1768 - RNA, 23 nt, synthetic construct
  source 1..23: mol_type = other RNA
ctgtatgggatcaggctagtact

SEQ ID NO: 1769 - RNA, 23 nt, synthetic construct
  source 1..23: mol_type = other RNA
ctgtatgggatcaggcttccact

SEQ ID NO: 1770 - RNA, 24 nt, synthetic construct
  source 1..24: mol_type = other RNA
tctgtatgggatcaggctagcact

SEQ ID NO: 1771 - RNA, 24 nt, synthetic construct
  source 1..24: mol_type = other RNA
tctgtatgggatcaggctagtact

SEQ ID NO: 1772 - RNA, 24 nt, synthetic construct
  source 1..24: mol_type = other RNA
tctgtatgggatcaggcttccact

SEQ ID NO: 1773 - RNA, 25 nt, synthetic construct
  source 1..25: mol_type = other RNA
ttctgtatgggatcaggctagcact

SEQ ID NO: 1774 - RNA, 25 nt, synthetic construct
  source 1..25: mol_type = other RNA
ttctgtatgggatcaggctagtact

SEQ ID NO: 1775 - RNA, 25 nt, synthetic construct
  source 1..25: mol_type = other RNA
ttctgtatgggatcaggcttccact

SEQ ID NO: 1776 - RNA, 26 nt, synthetic construct
  source 1..26: mol_type = other RNA
tttctgtatgggatcaggctagcact

SEQ ID NO: 1777 - RNA, 26 nt, synthetic construct
  source 1..26: mol_type = other RNA
tttctgtatgggatcaggctagtact

SEQ ID NO: 1778 - RNA, 26 nt, synthetic construct
  source 1..26: mol_type = other RNA
tttctgtatgggatcaggcttccact

SEQ ID NO: 1779 - RNA, 27 nt, synthetic construct
  source 1..27: mol_type = other RNA
ctttctgtatgggatcaggctagcact

SEQ ID NO: 1780 - RNA, 27 nt, synthetic construct
  source 1..27: mol_type = other RNA
ctttctgtatgggatcaggctagtact

SEQ ID NO: 1781 - RNA, 27 nt, synthetic construct
  source 1..27: mol_type = other RNA
ctttctgtatgggatcaggcttccact

SEQ ID NO: 1782 - RNA, 28 nt, synthetic construct
  source 1..28: mol_type = other RNA
gctttctgtatgggatcaggctagcact

SEQ ID NO: 1783 - RNA, 28 nt, synthetic construct
  source 1..28: mol_type = other RNA
gctttctgtatgggatcaggctagtact

SEQ ID NO: 1784 - RNA, 28 nt, synthetic construct
  source 1..28: mol_type = other RNA
gctttctgtatgggatcaggcttccact

SEQ ID NO: 1785 - RNA, 29 nt, synthetic construct
  source 1..29: mol_type = other RNA
agctttctgtatgggatcaggctagcact

SEQ ID NO: 1786 - RNA, 29 nt, synthetic construct
  source 1..29: mol_type = other RNA
agctttctgtatgggatcaggctagtact

SEQ ID NO: 1787 - RNA, 29 nt, synthetic construct
  source 1..29: mol_type = other RNA
agctttctgtatgggatcaggcttccact

SEQ ID NO: 1788 - RNA, 30 nt, synthetic construct
  source 1..30: mol_type = other RNA
aagctttctgtatgggatcaggctagcact

SEQ ID NO: 1789 - RNA, 30 nt, synthetic construct
  source 1..30: mol_type = other RNA
aagctttctgtatgggatcaggctagtact

SEQ ID NO: 1790 - RNA, 30 nt, synthetic construct
  source 1..30: mol_type = other RNA
aagctttctgtatgggatcaggcttccact

SEQ ID NO: 1791 - RNA, 31 nt, synthetic construct
  source 1..31: mol_type = other RNA
gaagctttctgtatgggatcaggctagcact

SEQ ID NO: 1792 - RNA, 31 nt, synthetic construct
  source 1..31: mol_type = other RNA
gaagctttctgtatgggatcaggctagtact

SEQ ID NO: 1793 - RNA, 31 nt, synthetic construct
  source 1..31: mol_type = other RNA
gaagctttctgtatgggatcaggcttccact

SEQ ID NO: 1794 - RNA, 32 nt, synthetic construct
  source 1..32: mol_type = other RNA
agaagctttctgtatgggatcaggctagcact

SEQ ID NO: 1795 - RNA, 32 nt, synthetic construct
  source 1..32: mol_type = other RNA
agaagctttctgtatgggatcaggctagtact

SEQ ID NO: 1796 - RNA, 32 nt, synthetic construct
  source 1..32: mol_type = other RNA
agaagctttctgtatgggatcaggcttccact

SEQ ID NO: 1797 - RNA, 33 nt, synthetic construct
  source 1..33: mol_type = other RNA
cagaagctttctgtatgggatcaggctagcact

SEQ ID NO: 1798 - RNA, 33 nt, synthetic construct
  source 1..33: mol_type = other RNA
cagaagctttctgtatgggatcaggctagtact

SEQ ID NO: 1799 - RNA, 33 nt, synthetic construct
  source 1..33: mol_type = other RNA
cagaagctttctgtatgggatcaggcttccact

SEQ ID NO: 1800 - RNA, 34 nt, synthetic construct
  source 1..34: mol_type = other RNA
gcagaagctttctgtatgggatcaggctagcact

SEQ ID NO: 1801 - RNA, 34 nt, synthetic construct
  source 1..34: mol_type = other RNA
gcagaagctttctgtatgggatcaggctagtact

SEQ ID NO: 1802 - RNA, 34 nt, synthetic construct
  source 1..34: mol_type = other RNA
gcagaagctttctgtatgggatcaggcttccact

SEQ ID NO: 1803 - RNA, 35 nt, synthetic construct
  source 1..35: mol_type = other RNA
tgcagaagctttctgtatgggatcaggctagcact

SEQ ID NO: 1804 - RNA, 35 nt, synthetic construct
  source 1..35: mol_type = other RNA
tgcagaagctttctgtatgggatcaggctagtact

SEQ ID NO: 1805 - RNA, 35 nt, synthetic construct
  source 1..35: mol_type = other RNA
tgcagaagctttctgtatgggatcaggcttccact

SEQ ID NO: 1806 - RNA, 36 nt, synthetic construct
  source 1..36: mol_type = other RNA
atgcagaagctttctgtatgggatcaggctagcact

SEQ ID NO: 1807 - RNA, 36 nt, synthetic construct
  source 1..36: mol_type = other RNA
atgcagaagctttctgtatgggatcaggctagtact

SEQ ID NO: 1808 - RNA, 36 nt, synthetic construct
  source 1..36: mol_type = other RNA
atgcagaagctttctgtatgggatcaggcttccact

SEQ ID NO: 1809 - RNA, 37 nt, synthetic construct
  source 1..37: mol_type = other RNA
gatgcagaagctttctgtatgggatcaggctagcact

SEQ ID NO: 1810 - RNA, 37 nt, synthetic construct
  source 1..37: mol_type = other RNA
gatgcagaagctttctgtatgggatcaggctagtact

SEQ ID NO: 1811 - RNA, 37 nt, synthetic construct
  source 1..37: mol_type = other RNA
gatgcagaagctttctgtatgggatcaggcttccact

SEQ ID NO: 1812 - RNA, 38 nt, synthetic construct
  source 1..38: mol_type = other RNA
ggatgcagaagctttctgtatgggatcaggctagcact

SEQ ID NO: 1813 - RNA, 38 nt, synthetic construct
  source 1..38: mol_type = other RNA
ggatgcagaagctttctgtatgggatcaggctagtact

SEQ ID NO: 1814 - RNA, 38 nt, synthetic construct
  source 1..38: mol_type = other RNA
ggatgcagaagctttctgtatgggatcaggcttccact

SEQ ID NO: 1815 - RNA, 39 nt, synthetic construct
  source 1..39: mol_type = other RNA
tggatgcagaagctttctgtatgggatcaggctagcact

SEQ ID NO: 1816 - RNA, 39 nt, synthetic construct
  source 1..39: mol_type = other RNA
tggatgcagaagctttctgtatgggatcaggctagtact

SEQ ID NO: 1817 - RNA, 39 nt, synthetic construct
  source 1..39: mol_type = other RNA
tggatgcagaagctttctgtatgggatcaggcttccact

SEQ ID NO: 1818 - RNA, 40 nt, synthetic construct
  source 1..40: mol_type = other RNA
ttggatgcagaagctttctgtatgggatcaggctagcact

SEQ ID NO: 1819 - RNA, 40 nt, synthetic construct
  source 1..40: mol_type = other RNA
ttggatgcagaagctttctgtatgggatcaggctagtact

SEQ ID NO: 1820 - RNA, 40 nt, synthetic construct
  source 1..40: mol_type = other RNA
ttggatgcagaagctttctgtatgggatcaggcttccact

SEQ ID NO: 1821 - RNA, 20 nt, synthetic construct
  source 1..20: mol_type = other RNA
tgggatcaggctagcacttt

SEQ ID NO: 1822 - RNA, 17 nt, synthetic construct
  source 1..17: mol_type = other RNA
agacaggtgtcttgctg

SEQ ID NO: 1823 - RNA, 18 nt, synthetic construct
  source 1..18: mol_type = other RNA
aagacaggtgtcttgctg

SEQ ID NO: 1824 - RNA, 19 nt, synthetic construct
  source 1..19: mol_type = other RNA
gaagacaggtgtcttgctg

SEQ ID NO: 1825 - RNA, 21 nt, synthetic construct
  source 1..21: mol_type = other RNA
gtgaagacaggtgtcttgctg

SEQ ID NO: 1826 - RNA, 22 nt, synthetic construct
  source 1..22: mol_type = other RNA
cgtgaagacaggtgtcttgctg

SEQ ID NO: 1827-1831 - skipped (5 entries)

SEQ ID NO: 1832 - RNA, 10 nt, synthetic construct
  source 1..10: mol_type = other RNA
caagacacct

SEQ ID NO: 1833 - RNA, 11 nt, synthetic construct
  source 1..11: mol_type = other RNA
caagacacctg

SEQ ID NO: 1834 - RNA, 12 nt, synthetic construct
  source 1..12: mol_type = other RNA
caagacacctgt

SEQ ID NO: 1835 - RNA, 13 nt, synthetic construct
  source 1..13: mol_type = other RNA
caagacacctgtc

SEQ ID NO: 1836 - RNA, 14 nt, synthetic construct
  source 1..14: mol_type = other RNA
caagacacctgtct

SEQ ID NO: 1837 - RNA, 15 nt, synthetic construct
  source 1..15: mol_type = other RNA
caagacacctgtctt

SEQ ID NO: 1838 - RNA, 16 nt, synthetic construct
  source 1..16: mol_type = other RNA
caagacacctgtcttc

SEQ ID NO: 1839 - RNA, 17 nt, synthetic construct
  source 1..17: mol_type = other RNA
caagacacctgtcttca

SEQ ID NO: 1840 - RNA, 18 nt, synthetic construct
  source 1..18: mol_type = other RNA
caagacacctgtcttcac

SEQ ID NO: 1841 - RNA, 19 nt, synthetic construct
  source 1..19: mol_type = other RNA
caagacacctgtcttcacg

SEQ ID NO: 1842 - RNA, 27 nt, synthetic construct
  source 1..27: mol_type = other RNA
gatcaggcttccactttggaaacccag

SEQ ID NO: 1843 - RNA, 28 nt, synthetic construct
  source 1..28: mol_type = other RNA
ggatcaggcttccactttggaaacccag

SEQ ID NO: 1844 - RNA, 29 nt, synthetic construct
  source 1..29: mol_type = other RNA
gggatcaggcttccactttggaaacccag

SEQ ID NO: 1845 - RNA, 30 nt, synthetic construct
  source 1..30: mol_type = other RNA
tgggatcaggcttccactttggaaacccag

SEQ ID NO: 1846 - RNA, 31 nt, synthetic construct
  source 1..31: mol_type = other RNA
atgggatcaggcttccactttggaaacccag

SEQ ID NO: 1847 - RNA, 32 nt, synthetic construct
  source 1..32: mol_type = other RNA
tatgggatcaggcttccactttggaaacccag

SEQ ID NO: 1848 - RNA, 33 nt, synthetic construct
  source 1..33: mol_type = other RNA
gtatgggatcaggcttccactttggaaacccag

SEQ ID NO: 1849 - RNA, 34 nt, synthetic construct
  source 1..34: mol_type = other RNA
tgtatgggatcaggcttccactttggaaacccag

SEQ ID NO: 1850 - RNA, 35 nt, synthetic construct
  source 1..35: mol_type = other RNA
ctgtatgggatcaggcttccactttggaaacccag

SEQ ID NO: 1851 - RNA, 36 nt, synthetic construct
  source 1..36: mol_type = other RNA
tctgtatgggatcaggcttccactttggaaacccag

SEQ ID NO: 1852 - RNA, 37 nt, synthetic construct
  source 1..37: mol_type = other RNA
ttctgtatgggatcaggcttccactttggaaacccag

SEQ ID NO: 1853 - RNA, 38 nt, synthetic construct
  source 1..38: mol_type = other RNA
tttctgtatgggatcaggcttccactttggaaacccag

SEQ ID NO: 1854 - RNA, 39 nt, synthetic construct
  source 1..39: mol_type = other RNA
ctttctgtatgggatcaggcttccactttggaaacccag

SEQ ID NO: 1855 - RNA, 40 nt, synthetic construct
  source 1..40: mol_type = other RNA
gctttctgtatgggatcaggcttccactttggaaacccag

SEQ ID NO: 1856 - RNA, 17 nt, synthetic construct
  source 1..17: mol_type = other RNA
ttatcagttttggatgc

SEQ ID NO: 1857 - RNA, 18 nt, synthetic construct
  source 1..18: mol_type = other RNA
attatcagttttggatgc

SEQ ID NO: 1858 - RNA, 19 nt, synthetic construct
  source 1..19: mol_type = other RNA
gattatcagttttggatgc

SEQ ID NO: 1859 - RNA, 21 nt, synthetic construct
  source 1..21: mol_type = other RNA
gtgattatcagttttggatgc

SEQ ID NO: 1860 - RNA, 22 nt, synthetic construct
  source 1..22: mol_type = other RNA
tgtgattatcagttttggatgc

SEQ ID NO: 1861-1865 - skipped (5 entries)

SEQ ID NO: 1866 - RNA, 10 nt, synthetic construct
  source 1..10: mol_type = other RNA
tccaaaactg

SEQ ID NO: 1867 - RNA, 11 nt, synthetic construct
  source 1..11: mol_type = other RNA
tccaaaactga

SEQ ID NO: 1868 - RNA, 12 nt, synthetic construct
  source 1..12: mol_type = other RNA
tccaaaactgat

SEQ ID NO: 1869 - RNA, 13 nt, synthetic construct
  source 1..13: mol_type = other RNA
tccaaaactgata

SEQ ID NO: 1870 - RNA, 14 nt, synthetic construct
  source 1..14: mol_type = other RNA
tccaaaactgataa

SEQ ID NO: 1871 - RNA, 15 nt, synthetic construct
  source 1..15: mol_type = other RNA
tccaaaactgataat

SEQ ID NO: 1872 - RNA, 16 nt, synthetic construct
  source 1..16: mol_type = other RNA
tccaaaactgataatc

SEQ ID NO: 1873 - RNA, 17 nt, synthetic construct
  source 1..17: mol_type = other RNA
tccaaaactgataatca

SEQ ID NO: 1874 - RNA, 18 nt, synthetic construct
  source 1..18: mol_type = other RNA
tccaaaactgataatcac

SEQ ID NO: 1875 - RNA, 19 nt, synthetic construct
  source 1..19: mol_type = other RNA
tccaaaactgataatcaca

SEQ ID NO: 1876 - RNA, 21 nt, synthetic construct
  source 1..21: mol_type = other RNA
cccatacagaaagcttctgca

SEQ ID NO: 1877 - RNA, 21 nt, synthetic construct
  source 1..21: mol_type = other RNA
cccatacagaaagcttttgca

SEQ ID NO: 1878 - RNA, 22 nt, synthetic construct
  source 1..22: mol_type = other RNA
tcccatacagaaagcttctgca

SEQ ID NO: 1879 - RNA, 22 nt, synthetic construct
  source 1..22: mol_type = other RNA
tcccatacagaaagcttttgca

SEQ ID NO: 1880 - RNA, 23 nt, synthetic construct
  source 1..23: mol_type = other RNA
atcccatacagaaagcttctgca

SEQ ID NO: 1881 - RNA, 23 nt, synthetic construct
  source 1..23: mol_type = other RNA
atcccatacagaaagcttttgca

SEQ ID NO: 1882 - RNA, 24 nt, synthetic construct
  source 1..24: mol_type = other RNA
gatcccatacagaaagcttctgca

SEQ ID NO: 1883 - RNA, 24 nt, synthetic construct
  source 1..24: mol_type = other RNA
gatcccatacagaaagcttttgca

SEQ ID NO: 1884 - RNA, 25 nt, synthetic construct
  source 1..25: mol_type = other RNA
tgatcccatacagaaagcttctgca

SEQ ID NO: 1885 - RNA, 25 nt, synthetic construct
  source 1..25: mol_type = other RNA
tgatcccatacagaaagcttttgca

SEQ ID NO: 1886 - RNA, 26 nt, synthetic construct
  source 1..26: mol_type = other RNA
ctgatcccatacagaaagcttctgca

SEQ ID NO: 1887 - RNA, 26 nt, synthetic construct
  source 1..26: mol_type = other RNA
ctgatcccatacagaaagcttttgca

SEQ ID NO: 1888 - RNA, 27 nt, synthetic construct
  source 1..27: mol_type = other RNA
cctgatcccatacagaaagcttctgca

SEQ ID NO: 1889 - RNA, 27 nt, synthetic construct
  source 1..27: mol_type = other RNA
cctgatcccatacagaaagcttttgca

SEQ ID NO: 1890 - RNA, 28 nt, synthetic construct
  source 1..28: mol_type = other RNA
gcctgatcccatacagaaagcttctgca

SEQ ID NO: 1891 - RNA, 28 nt, synthetic construct
  source 1..28: mol_type = other RNA
gcctgatcccatacagaaagcttttgca

SEQ ID NO: 1892 - RNA, 29 nt, synthetic construct
  source 1..29: mol_type = other RNA
agcctgatcccatacagaaagcttctgca

SEQ ID NO: 1893 - RNA, 29 nt, synthetic construct
  source 1..29: mol_type = other RNA
agcctgatcccatacagaaagcttttgca

SEQ ID NO: 1894 - RNA, 30 nt, synthetic construct
  source 1..30: mol_type = other RNA
aagcctgatcccatacagaaagcttctgca

SEQ ID NO: 1895 - RNA, 30 nt, synthetic construct
  source 1..30: mol_type = other RNA
aagcctgatcccatacagaaagcttttgca

SEQ ID NO: 1896 - RNA, 31 nt, synthetic construct
  source 1..31: mol_type = other RNA
gaagcctgatcccatacagaaagcttctgca

SEQ ID NO: 1897 - RNA, 31 nt, synthetic construct
  source 1..31: mol_type = other RNA
gaagcctgatcccatacagaaagcttttgca

SEQ ID NO: 1898 - RNA, 32 nt, synthetic construct
  source 1..32: mol_type = other RNA
ggaagcctgatcccatacagaaagcttctgca

SEQ ID NO: 1899 - RNA, 32 nt, synthetic construct
  source 1..32: mol_type = other RNA
ggaagcctgatcccatacagaaagcttttgca

SEQ ID NO: 1900 - RNA, 33 nt, synthetic construct
  source 1..33: mol_type = other RNA
tggaagcctgatcccatacagaaagcttctgca

SEQ ID NO: 1901 - RNA, 33 nt, synthetic construct
  source 1..33: mol_type = other RNA
tggaagcctgatcccatacagaaagcttttgca

SEQ ID NO: 1902 - RNA, 34 nt, synthetic construct
  source 1..34: mol_type = other RNA
gtggaagcctgatcccatacagaaagcttctgca

SEQ ID NO: 1903 - RNA, 34 nt, synthetic construct
  source 1..34: mol_type = other RNA
gtggaagcctgatcccatacagaaagcttttgca

SEQ ID NO: 1904 - RNA, 35 nt, synthetic construct
  source 1..35: mol_type = other RNA
agtggaagcctgatcccatacagaaagcttctgca

SEQ ID NO: 1905 - RNA, 35 nt, synthetic construct
  source 1..35: mol_type = other RNA
agtggaagcctgatcccatacagaaagcttttgca

SEQ ID NO: 1906 - RNA, 36 nt, synthetic construct
  source 1..36: mol_type = other RNA
aagtggaagcctgatcccatacagaaagcttctgca

SEQ ID NO: 1907 - RNA, 36 nt, synthetic construct
  source 1..36: mol_type = other RNA
aagtggaagcctgatcccatacagaaagcttttgca

SEQ ID NO: 1908 - RNA, 37 nt, synthetic construct
  source 1..37: mol_type = other RNA
aaagtggaagcctgatcccatacagaaagcttctgca

SEQ ID NO: 1909 - RNA, 37 nt, synthetic construct
  source 1..37: mol_type = other RNA
aaagtggaagcctgatcccatacagaaagcttttgca

SEQ ID NO: 1910 - RNA, 38 nt, synthetic construct
  source 1..38: mol_type = other RNA
caaagtggaagcctgatcccatacagaaagcttctgca

SEQ ID NO: 1911 - RNA, 38 nt, synthetic construct
  source 1..38: mol_type = other RNA
caaagtggaagcctgatcccatacagaaagcttttgca

SEQ ID NO: 1912 - RNA, 39 nt, synthetic construct
  source 1..39: mol_type = other RNA
ccaaagtggaagcctgatcccatacagaaagcttctgca

SEQ ID NO: 1913 - RNA, 39 nt, synthetic construct
  source 1..39: mol_type = other RNA
ccaaagtggaagcctgatcccatacagaaagcttttgca

SEQ ID NO: 1914 - RNA, 40 nt, synthetic construct
  source 1..40: mol_type = other RNA
tccaaagtggaagcctgatcccatacagaaagcttctgca

SEQ ID NO: 1915 - RNA, 40 nt, synthetic construct
  source 1..40: mol_type = other RNA
tccaaagtggaagcctgatcccatacagaaagcttttgca

SEQ ID NO: 1916 - RNA, 20 nt, synthetic construct
  source 1..20: mol_type = other RNA
gatcccatacagaaagcttt

SEQ ID NO: 1917 - RNA, 17 nt, synthetic construct
  source 1..17: mol_type = other RNA
tgggtttccaaagtgga

SEQ ID NO: 1918 - RNA, 18 nt, synthetic construct
  source 1..18: mol_type = other RNA
ctgggtttccaaagtgga

SEQ ID NO: 1919 - RNA, 19 nt, synthetic construct
  source 1..19: mol_type = other RNA
gctgggtttccaaagtgga

SEQ ID NO: 1920 - RNA, 21 nt, synthetic construct
  source 1..21: mol_type = other RNA
ttgctgggtttccaaagtgga

SEQ ID NO: 1921 - RNA, 22 nt, synthetic construct
  source 1..22: mol_type = other RNA
cttgctgggtttccaaagtgga

SEQ ID NO: 1922-1926 - skipped (5 entries)

SEQ ID NO: 1927 - RNA, 10 nt, synthetic construct
  source 1..10: mol_type = other RNA
actttggaaa

SEQ ID NO: 1928 - RNA, 11 nt, synthetic construct
  source 1..11: mol_type = other RNA
actttggaaac

SEQ ID NO: 1929 - RNA, 12 nt, synthetic construct
  source 1..12: mol_type = other RNA
actttggaaacc

SEQ ID NO: 1930 - RNA, 13 nt, synthetic construct
  source 1..13: mol_type = other RNA
actttggaaaccc

SEQ ID NO: 1931 - RNA, 14 nt, synthetic construct
  source 1..14: mol_type = other RNA
actttggaaaccca

SEQ ID NO: 1932 - RNA, 15 nt, synthetic construct
  source 1..15: mol_type = other RNA
actttggaaacccag

SEQ ID NO: 1933 - RNA, 16 nt, synthetic construct
  source 1..16: mol_type = other RNA
actttggaaacccagc

SEQ ID NO: 1934 - RNA, 17 nt, synthetic construct
  source 1..17: mol_type = other RNA
actttggaaacccagca

SEQ ID NO: 1935 - RNA, 18 nt, synthetic construct
  source 1..18: mol_type = other RNA
actttggaaacccagcaa

SEQ ID NO: 1936 - RNA, 19 nt, synthetic construct
  source 1..19: mol_type = other RNA
actttggaaacccagcaag

SEQ ID NO: 1937 - RNA, 12 nt, synthetic construct
  source 1..12: mol_type = other RNA
gatcaggcttcc

SEQ ID NO: 1938 - RNA, 13 nt, synthetic construct
  source 1..13: mol_type = other RNA
ggatcaggcttcc

SEQ ID NO: 1939 - RNA, 14 nt, synthetic construct
  source 1..14: mol_type = other RNA
gggatcaggcttcc

SEQ ID NO: 1940 - RNA, 15 nt, synthetic construct
  source 1..15: mol_type = other RNA
tgggatcaggcttcc

SEQ ID NO: 1941 - RNA, 16 nt, synthetic construct
  source 1..16: mol_type = other RNA
atgggatcaggcttcc

SEQ ID NO: 1942 - RNA, 17 nt, synthetic construct
  source 1..17: mol_type = other RNA
tatgggatcaggcttcc

SEQ ID NO: 1943 - RNA, 18 nt, synthetic construct
  source 1..18: mol_type = other RNA
gtatgggatcaggcttcc

SEQ ID NO: 1944 - RNA, 19 nt, synthetic construct
  source 1..19: mol_type = other RNA
tgtatgggatcaggcttcc

SEQ ID NO: 1945 - RNA, 20 nt, synthetic construct
  source 1..20: mol_type = other RNA
ctgtatgggatcaggcttcc

SEQ ID NO: 1946 - RNA, 21 nt, synthetic construct
  source 1..21: mol_type = other RNA
tctgtatgggatcaggcttcc

SEQ ID NO: 1947 - RNA, 22 nt, synthetic construct
  source 1..22: mol_type = other RNA
ttctgtatgggatcaggcttcc

SEQ ID NO: 1948 - RNA, 23 nt, synthetic construct
  source 1..23: mol_type = other RNA
tttctgtatgggatcaggcttcc

SEQ ID NO: 1949 - RNA, 24 nt, synthetic construct
  source 1..24: mol_type = other RNA
ctttctgtatgggatcaggcttcc

SEQ ID NO: 1950 - RNA, 25 nt, synthetic construct
  source 1..25: mol_type = other RNA
gctttctgtatgggatcaggcttcc

SEQ ID NO: 1951 - RNA, 26 nt, synthetic construct
  source 1..26: mol_type = other RNA
agctttctgtatgggatcaggcttcc

SEQ ID NO: 1952 - RNA, 27 nt, synthetic construct
  source 1..27: mol_type = other RNA
aagctttctgtatgggatcaggcttcc

SEQ ID NO: 1953 - RNA, 28 nt, synthetic construct
  source 1..28: mol_type = other RNA
gaagctttctgtatgggatcaggcttcc

SEQ ID NO: 1954 - RNA, 29 nt, synthetic construct
  source 1..29: mol_type = other RNA
agaagctttctgtatgggatcaggcttcc

SEQ ID NO: 1955 - RNA, 30 nt, synthetic construct
  source 1..30: mol_type = other RNA
cagaagctttctgtatgggatcaggcttcc

SEQ ID NO: 1956 - RNA, 31 nt, synthetic construct
  source 1..31: mol_type = other RNA
gcagaagctttctgtatgggatcaggcttcc

SEQ ID NO: 1957 - RNA, 32 nt, synthetic construct
  source 1..32: mol_type = other RNA
tgcagaagctttctgtatgggatcaggcttcc

SEQ ID NO: 1958 - RNA, 33 nt, synthetic construct
  source 1..33: mol_type = other RNA
atgcagaagctttctgtatgggatcaggcttcc

SEQ ID NO: 1959 - RNA, 34 nt, synthetic construct
  source 1..34: mol_type = other RNA
gatgcagaagctttctgtatgggatcaggcttcc

SEQ ID NO: 1960 - RNA, 35 nt, synthetic construct
  source 1..35: mol_type = other RNA
ggatgcagaagctttctgtatgggatcaggcttcc

SEQ ID NO: 1961 - RNA, 36 nt, synthetic construct
  source 1..36: mol_type = other RNA
tggatgcagaagctttctgtatgggatcaggcttcc

SEQ ID NO: 1962 - RNA, 37 nt, synthetic construct
  source 1..37: mol_type = other RNA
ttggatgcagaagctttctgtatgggatcaggcttcc

SEQ ID NO: 1963 - RNA, 38 nt, synthetic construct
  source 1..38: mol_type = other RNA
tttggatgcagaagctttctgtatgggatcaggcttcc

SEQ ID NO: 1964 - RNA, 39 nt, synthetic construct
  source 1..39: mol_type = other RNA
ttttggatgcagaagctttctgtatgggatcaggcttcc

SEQ ID NO: 1965 - RNA, 40 nt, synthetic construct
  source 1..40: mol_type = other RNA
gttttggatgcagaagctttctgtatgggatcaggcttcc

SEQ ID NO: 1966 - RNA, 17 nt, synthetic construct
  source 1..17: mol_type = other RNA
atgcagaagctttctgt

SEQ ID NO: 1967 - RNA, 18 nt, synthetic construct
  source 1..18: mol_type = other RNA
gatgcagaagctttctgt

SEQ ID NO: 1968 - RNA, 19 nt, synthetic construct
  source 1..19: mol_type = other RNA
ggatgcagaagctttctgt

SEQ ID NO: 1969 - RNA, 21 nt, synthetic construct
  source 1..21: mol_type = other RNA
ttggatgcagaagctttctgt

SEQ ID NO: 1970 - RNA, 22 nt, synthetic construct
  source 1..22: mol_type = other RNA
tttggatgcagaagctttctgt

SEQ ID NO: 1971-1975 - skipped (5 entries)

SEQ ID NO: 1976 - RNA, 10 nt, synthetic construct
  source 1..10: mol_type = other RNA
gaaagcttct

SEQ ID NO: 1977 - RNA, 11 nt, synthetic construct
  source 1..11: mol_type = other RNA
gaaagcttctg

SEQ ID NO: 1978 - RNA, 12 nt, synthetic construct
  source 1..12: mol_type = other RNA
gaaagcttctgc

SEQ ID NO: 1979 - RNA, 13 nt, synthetic construct
  source 1..13: mol_type = other RNA
gaaagcttctgca

SEQ ID NO: 1980 - RNA, 14 nt, synthetic construct
  source 1..14: mol_type = other RNA
gaaagcttctgcat

SEQ ID NO: 1981 - RNA, 15 nt, synthetic construct
  source 1..15: mol_type = other RNA
gaaagcttctgcatc

SEQ ID NO: 1982 - RNA, 16 nt, synthetic construct
  source 1..16: mol_type = other RNA
gaaagcttctgcatcc

SEQ ID NO: 1983 - RNA, 17 nt, synthetic construct
  source 1..17: mol_type = other RNA
gaaagcttctgcatcca

SEQ ID NO: 1984 - RNA, 18 nt, synthetic construct
  source 1..18: mol_type = other RNA
gaaagcttctgcatccaa

SEQ ID NO: 1985 - RNA, 19 nt, synthetic construct
  source 1..19: mol_type = other RNA
gaaagcttctgcatccaaa

SEQ ID NO: 1986 - RNA, 10 nt, synthetic construct
  source 1..10: mol_type = other RNA
atcccataca

SEQ ID NO: 1987 - RNA, 11 nt, synthetic construct
  source 1..11: mol_type = other RNA
gatcccataca

SEQ ID NO: 1988 - RNA, 12 nt, synthetic construct
  source 1..12: mol_type = other RNA
tgatcccataca

SEQ ID NO: 1989 - RNA, 13 nt, synthetic construct
  source 1..13: mol_type = other RNA
ctgatcccataca

SEQ ID NO: 1990 - RNA, 14 nt, synthetic construct
  source 1..14: mol_type = other RNA
cctgatcccataca

SEQ ID NO: 1991 - RNA, 15 nt, synthetic construct
  source 1..15: mol_type = other RNA
gcctgatcccataca

SEQ ID NO: 1992 - RNA, 16 nt, synthetic construct
  source 1..16: mol_type = other RNA
agcctgatcccataca

SEQ ID NO: 1993 - RNA, 17 nt, synthetic construct
  source 1..17: mol_type = other RNA
aagcctgatcccataca

SEQ ID NO: 1994 - RNA, 18 nt, synthetic construct
  source 1..18: mol_type = other RNA
gaagcctgatcccataca

SEQ ID NO: 1995 - RNA, 19 nt, synthetic construct
  source 1..19: mol_type = other RNA
ggaagcctgatcccataca

SEQ ID NO: 1996 - RNA, 20 nt, synthetic construct
  source 1..20: mol_type = other RNA
tggaagcctgatcccataca

SEQ ID NO: 1997 - RNA, 21 nt, synthetic construct
  source 1..21: mol_type = other RNA
gtggaagcctgatcccataca

SEQ ID NO: 1998 - RNA, 22 nt, synthetic construct
  source 1..22: mol_type = other RNA
agtggaagcctgatcccataca

SEQ ID NO: 1999 - RNA, 23 nt, synthetic construct
  source 1..23: mol_type = other RNA
aagtggaagcctgatcccataca

SEQ ID NO: 2000 - RNA, 24 nt, synthetic construct
  source 1..24: mol_type = other RNA
aaagtggaagcctgatcccataca

SEQ ID NO: 2001 - RNA, 25 nt, synthetic construct
  source 1..25: mol_type = other RNA
caaagtggaagcctgatcccataca

SEQ ID NO: 2002 - RNA, 26 nt, synthetic construct
  source 1..26: mol_type = other RNA
ccaaagtggaagcctgatcccataca

SEQ ID NO: 2003 - RNA, 27 nt, synthetic construct
  source 1..27: mol_type = other RNA
tccaaagtggaagcctgatcccataca

SEQ ID NO: 2004 - RNA, 28 nt, synthetic construct
  source 1..28: mol_type = other RNA
ttccaaagtggaagcctgatcccataca

SEQ ID NO: 2005 - RNA, 29 nt, synthetic construct
  source 1..29: mol_type = other RNA
tttccaaagtggaagcctgatcccataca

SEQ ID NO: 2006 - RNA, 30 nt, synthetic construct
  source 1..30: mol_type = other RNA
gtttccaaagtggaagcctgatcccataca

SEQ ID NO: 2007 - RNA, 31 nt, synthetic construct
  source 1..31: mol_type = other RNA
ggtttccaaagtggaagcctgatcccataca

SEQ ID NO: 2008 - RNA, 32 nt, synthetic construct
  source 1..32: mol_type = other RNA
gggtttccaaagtggaagcctgatcccataca

SEQ ID NO: 2009 - RNA, 33 nt, synthetic construct
  source 1..33: mol_type = other RNA
tgggtttccaaagtggaagcctgatcccataca

SEQ ID NO: 2010 - RNA, 34 nt, synthetic construct
  source 1..34: mol_type = other RNA
ctgggtttccaaagtggaagcctgatcccataca

SEQ ID NO: 2011 - RNA, 35 nt, synthetic construct
  source 1..35: mol_type = other RNA
gctgggtttccaaagtggaagcctgatcccataca

SEQ ID NO: 2012 - RNA, 36 nt, synthetic construct
  source 1..36: mol_type = other RNA
tgctgggtttccaaagtggaagcctgatcccataca

SEQ ID NO: 2013 - RNA, 37 nt, synthetic construct
  source 1..37: mol_type = other RNA
ttgctgggtttccaaagtggaagcctgatcccataca

SEQ ID NO: 2014 - RNA, 38 nt, synthetic construct
  source 1..38: mol_type = other RNA
cttgctgggtttccaaagtggaagcctgatcccataca

SEQ ID NO: 2015 - RNA, 39 nt, synthetic construct
  source 1..39: mol_type = other RNA
tcttgctgggtttccaaagtggaagcctgatcccataca

SEQ ID NO: 2016 - RNA, 40 nt, synthetic construct
  source 1..40: mol_type = other RNA
gtcttgctgggtttccaaagtggaagcctgatcccataca

SEQ ID NO: 2017 - RNA, 17 nt, synthetic construct
  source 1..17: mol_type = other RNA
cttgctgggtttccaaa

SEQ ID NO: 2018 - RNA, 18 nt, synthetic construct
  source 1..18: mol_type = other RNA
tcttgctgggtttccaaa

SEQ ID NO: 2019 - RNA, 19 nt, synthetic construct
  source 1..19: mol_type = other RNA
gtcttgctgggtttccaaa

SEQ ID NO: 2020 - RNA, 21 nt, synthetic construct
  source 1..21: mol_type = other RNA
gtgtcttgctgggtttccaaa

SEQ ID NO: 2021 - RNA, 22 nt, synthetic construct
  source 1..22: mol_type = other RNA
ggtgtcttgctgggtttccaaa

SEQ ID NO: 2022-2026 - skipped (5 entries)

SEQ ID NO: 2027 - RNA, 10 nt, synthetic construct
  source 1..10: mol_type = other RNA
ggaaacccag

SEQ ID NO: 2028 - RNA, 11 nt, synthetic construct
  source 1..11: mol_type = other RNA
ggaaacccagc

SEQ ID NO: 2029 - RNA, 12 nt, synthetic construct
  source 1..12: mol_type = other RNA
ggaaacccagca

SEQ ID NO: 2030 - RNA, 13 nt, synthetic construct
  source 1..13: mol_type = other RNA
ggaaacccagcaa

SEQ ID NO: 2031 - RNA, 14 nt, synthetic construct
  source 1..14: mol_type = other RNA
ggaaacccagcaag

SEQ ID NO: 2032 - RNA, 15 nt, synthetic construct
  source 1..15: mol_type = other RNA
ggaaacccagcaaga

SEQ ID NO: 2033 - RNA, 16 nt, synthetic construct
  source 1..16: mol_type = other RNA
ggaaacccagcaagac

SEQ ID NO: 2034 - RNA, 17 nt, synthetic construct
  source 1..17: mol_type = other RNA
ggaaacccagcaagaca

SEQ ID NO: 2035 - RNA, 18 nt, synthetic construct
  source 1..18: mol_type = other RNA
ggaaacccagcaagacac

SEQ ID NO: 2036 - RNA, 19 nt, synthetic construct
  source 1..19: mol_type = other RNA
ggaaacccagcaagacacc

SEQ ID NO: 2037 - RNA, 17 nt, synthetic construct
  source 1..17: mol_type = other RNA
gatcaggctagcacttt

SEQ ID NO: 2038 - RNA, 17 nt, synthetic construct
  source 1..17: mol_type = other RNA
gatcaggctagtacttt

SEQ ID NO: 2039 - RNA, 17 nt, synthetic construct
  source 1..17: mol_type = other RNA
gatcaggcttcaacttt

SEQ ID NO: 2040 - RNA, 17 nt, synthetic construct
  source 1..17: mol_type = other RNA
gatcaggcttccacttt

SEQ ID NO: 2041 - RNA, 17 nt, synthetic construct
  source 1..17: mol_type = other RNA
gatcaggcttcgacttt

SEQ ID NO: 2042 - RNA, 17 nt, synthetic construct
  source 1..17: mol_type = other RNA
gatcaggcttctacttt

SEQ ID NO: 2043 - RNA, 18 nt, synthetic construct
  source 1..18: mol_type = other RNA
ggatcaggctagcacttt

SEQ ID NO: 2044 - RNA, 18 nt, synthetic construct
  source 1..18: mol_type = other RNA
ggatcaggctagtacttt

SEQ ID NO: 2045 - RNA, 18 nt, synthetic construct
  source 1..18: mol_type = other RNA
ggatcaggcttcaacttt

SEQ ID NO: 2046 - RNA, 18 nt, synthetic construct
  source 1..18: mol_type = other RNA
ggatcaggcttccacttt

SEQ ID NO: 2047 - RNA, 18 nt, synthetic construct
  source 1..18: mol_type = other RNA
ggatcaggcttcgacttt

SEQ ID NO: 2048 - RNA, 18 nt, synthetic construct
  source 1..18: mol_type = other RNA
ggatcaggcttctacttt

SEQ ID NO: 2049 - RNA, 19 nt, synthetic construct
  source 1..19: mol_type = other RNA
gggatcaggctagcacttt

SEQ ID NO: 2050 - RNA, 19 nt, synthetic construct
  source 1..19: mol_type = other RNA
gggatcaggctagtacttt

SEQ ID NO: 2051 - RNA, 19 nt, synthetic construct
  source 1..19: mol_type = other RNA
gggatcaggcttcaacttt

SEQ ID NO: 2052 - RNA, 19 nt, synthetic construct
  source 1..19: mol_type = other RNA
gggatcaggcttccacttt

SEQ ID NO: 2053 - RNA, 19 nt, synthetic construct
  source 1..19: mol_type = other RNA
gggatcaggcttcgacttt

SEQ ID NO: 2054 - RNA, 19 nt, synthetic construct
  source 1..19: mol_type = other RNA
gggatcaggcttctacttt

SEQ ID NO: 2055 - RNA, 21 nt, synthetic construct
  source 1..21: mol_type = other RNA
atgggatcaggctagcacttt

SEQ ID NO: 2056 - RNA, 21 nt, synthetic construct
  source 1..21: mol_type = other RNA
atgggatcaggctagtacttt

SEQ ID NO: 2057 - RNA, 21 nt, synthetic construct
  source 1..21: mol_type = other RNA
atgggatcaggcttcaacttt

SEQ ID NO: 2058 - RNA, 21 nt, synthetic construct
  source 1..21: mol_type = other RNA
atgggatcaggcttccacttt

SEQ ID NO: 2059 - RNA, 21 nt, synthetic construct
  source 1..21: mol_type = other RNA
atgggatcaggcttcgacttt

SEQ ID NO: 2060 - RNA, 21 nt, synthetic construct
  source 1..21: mol_type = other RNA
atgggatcaggcttctacttt

SEQ ID NO: 2061 - RNA, 22 nt, synthetic construct
  source 1..22: mol_type = other RNA
tatgggatcaggctagcacttt

SEQ ID NO: 2062 - RNA, 22 nt, synthetic construct
  source 1..22: mol_type = other RNA
tatgggatcaggctagtacttt

SEQ ID NO: 2063 - RNA, 22 nt, synthetic construct
  source 1..22: mol_type = other RNA
tatgggatcaggcttcaacttt

SEQ ID NO: 2064 - RNA, 22 nt, synthetic construct
  source 1..22: mol_type = other RNA
tatgggatcaggcttccacttt

SEQ ID NO: 2065 - RNA, 22 nt, synthetic construct
  source 1..22: mol_type = other RNA
tatgggatcaggcttcgacttt

SEQ ID NO: 2066 - RNA, 22 nt, synthetic construct
  source 1..22: mol_type = other RNA
tatgggatcaggcttctacttt

SEQ ID NO: 2067 - RNA, 23 nt, synthetic construct
  source 1..23: mol_type = other RNA
gtatgggatcaggctagcacttt

SEQ ID NO: 2068 - RNA, 23 nt, synthetic construct
  source 1..23: mol_type = other RNA
gtatgggatcaggctagtacttt

SEQ ID NO: 2069 - RNA, 23 nt, synthetic construct
  source 1..23: mol_type = other RNA
gtatgggatcaggcttcaacttt

SEQ ID NO: 2070 - RNA, 23 nt, synthetic construct
  source 1..23: mol_type = other RNA
gtatgggatcaggcttccacttt

SEQ ID NO: 2071 - RNA, 23 nt, synthetic construct
  source 1..23: mol_type = other RNA
gtatgggatcaggcttcgacttt

SEQ ID NO: 2072 - RNA, 23 nt, synthetic construct
  source 1..23: mol_type = other RNA
gtatgggatcaggcttctacttt

SEQ ID NO: 2073 - RNA, 24 nt, synthetic construct
  source 1..24: mol_type = other RNA
tgtatgggatcaggctagcacttt

SEQ ID NO: 2074 - RNA, 24 nt, synthetic construct
  source 1..24: mol_type = other RNA
tgtatgggatcaggctagtacttt

SEQ ID NO: 2075 - RNA, 24 nt, synthetic construct
  source 1..24: mol_type = other RNA
tgtatgggatcaggcttcaacttt

SEQ ID NO: 2076 - RNA, 24 nt, synthetic construct
  source 1..24: mol_type = other RNA
tgtatgggatcaggcttccacttt

SEQ ID NO: 2077 - RNA, 24 nt, synthetic construct
  source 1..24: mol_type = other RNA
tgtatgggatcaggcttcgacttt

SEQ ID NO: 2078 - RNA, 24 nt, synthetic construct
  source 1..24: mol_type = other RNA
tgtatgggatcaggcttctacttt

SEQ ID NO: 2079 - RNA, 25 nt, synthetic construct
  source 1..25: mol_type = other RNA
ctgtatgggatcaggctagcacttt

SEQ ID NO: 2080 - RNA, 25 nt, synthetic construct
  source 1..25: mol_type = other RNA
ctgtatgggatcaggctagtacttt

SEQ ID NO: 2081 - RNA, 25 nt, synthetic construct
  source 1..25: mol_type = other RNA
ctgtatgggatcaggcttcaacttt

SEQ ID NO: 2082 - RNA, 25 nt, synthetic construct
  source 1..25: mol_type = other RNA
ctgtatgggatcaggcttccacttt

SEQ ID NO: 2083 - RNA, 25 nt, synthetic construct
  source 1..25: mol_type = other RNA
ctgtatgggatcaggcttcgacttt

SEQ ID NO: 2084 - RNA, 25 nt, synthetic construct
  source 1..25: mol_type = other RNA
ctgtatgggatcaggcttctacttt

SEQ ID NO: 2085 - RNA, 26 nt, synthetic construct
  source 1..26: mol_type = other RNA
tctgtatgggatcaggctagcacttt

SEQ ID NO: 2086 - RNA, 26 nt, synthetic construct
  source 1..26: mol_type = other RNA
tctgtatgggatcaggctagtacttt

SEQ ID NO: 2087 - RNA, 26 nt, synthetic construct
  source 1..26: mol_type = other RNA
tctgtatgggatcaggcttcaacttt

SEQ ID NO: 2088 - RNA, 26 nt, synthetic construct
  source 1..26: mol_type = other RNA
tctgtatgggatcaggcttccacttt

SEQ ID NO: 2089 - RNA, 26 nt, synthetic construct
  source 1..26: mol_type = other RNA
tctgtatgggatcaggcttcgacttt

SEQ ID NO: 2090 - RNA, 26 nt, synthetic construct
  source 1..26: mol_type = other RNA
tctgtatgggatcaggcttctacttt

SEQ ID NO: 2091 - RNA, 27 nt, synthetic construct
  source 1..27: mol_type = other RNA
ttctgtatgggatcaggctagcacttt

SEQ ID NO: 2092 - RNA, 27 nt, synthetic construct
  source 1..27: mol_type = other RNA
ttctgtatgggatcaggctagtacttt

SEQ ID NO: 2093 - RNA, 27 nt, synthetic construct
  source 1..27: mol_type = other RNA
ttctgtatgggatcaggcttcaacttt

SEQ ID NO: 2094 - RNA, 27 nt, synthetic construct
  source 1..27: mol_type = other RNA
ttctgtatgggatcaggcttccacttt

SEQ ID NO: 2095 - RNA, 27 nt, synthetic construct
  source 1..27: mol_type = other RNA
ttctgtatgggatcaggcttcgacttt

SEQ ID NO: 2096 - RNA, 27 nt, synthetic construct
  source 1..27: mol_type = other RNA
ttctgtatgggatcaggcttctacttt

SEQ ID NO: 2097 - RNA, 28 nt, synthetic construct
  source 1..28: mol_type = other RNA
tttctgtatgggatcaggctagcacttt

SEQ ID NO: 2098 - RNA, 28 nt, synthetic construct
  source 1..28: mol_type = other RNA
tttctgtatgggatcaggctagtacttt

SEQ ID NO: 2099 - RNA, 28 nt, synthetic construct
  source 1..28: mol_type = other RNA
tttctgtatgggatcaggcttcaacttt

SEQ ID NO: 2100 - RNA, 28 nt, synthetic construct
  source 1..28: mol_type = other RNA
tttctgtatgggatcaggcttccacttt

SEQ ID NO: 2101 - RNA, 28 nt, synthetic construct
  source 1..28: mol_type = other RNA
tttctgtatgggatcaggcttcgacttt

SEQ ID NO: 2102 - RNA, 28 nt, synthetic construct
  source 1..28: mol_type = other RNA
tttctgtatgggatcaggcttctacttt

SEQ ID NO: 2103 - RNA, 29 nt, synthetic construct
  source 1..29: mol_type = other RNA
ctttctgtatgggatcaggctagcacttt

SEQ ID NO: 2104 - RNA, 29 nt, synthetic construct
  source 1..29: mol_type = other RNA
ctttctgtatgggatcaggctagtacttt

SEQ ID NO: 2105 - RNA, 29 nt, synthetic construct
  source 1..29: mol_type = other RNA
ctttctgtatgggatcaggcttcaacttt

SEQ ID NO: 2106 - RNA, 29 nt, synthetic construct
  source 1..29: mol_type = other RNA
ctttctgtatgggatcaggcttccacttt

SEQ ID NO: 2107 - RNA, 29 nt, synthetic construct
  source 1..29: mol_type = other RNA
ctttctgtatgggatcaggcttcgacttt

SEQ ID NO: 2108 - RNA, 29 nt, synthetic construct
  source 1..29: mol_type = other RNA
ctttctgtatgggatcaggcttctacttt

SEQ ID NO: 2109 - RNA, 30 nt, synthetic construct
  source 1..30: mol_type = other RNA
gctttctgtatgggatcaggctagcacttt

SEQ ID NO: 2110 - RNA, 30 nt, synthetic construct
  source 1..30: mol_type = other RNA
gctttctgtatgggatcaggctagtacttt

SEQ ID NO: 2111 - RNA, 30 nt, synthetic construct
  source 1..30: mol_type = other RNA
gctttctgtatgggatcaggcttcaacttt

SEQ ID NO: 2112 - RNA, 30 nt, synthetic construct
  source 1..30: mol_type = other RNA
gctttctgtatgggatcaggcttccacttt

SEQ ID NO: 2113 - RNA, 30 nt, synthetic construct
  source 1..30: mol_type = other RNA
gctttctgtatgggatcaggcttcgacttt

SEQ ID NO: 2114 - RNA, 30 nt, synthetic construct
  source 1..30: mol_type = other RNA
gctttctgtatgggatcaggcttctacttt

SEQ ID NO: 2115 - RNA, 31 nt, synthetic construct
  source 1..31: mol_type = other RNA
agctttctgtatgggatcaggctagcacttt

SEQ ID NO: 2116 - RNA, 31 nt, synthetic construct
  source 1..31: mol_type = other RNA
agctttctgtatgggatcaggctagtacttt

SEQ ID NO: 2117 - RNA, 31 nt, synthetic construct
  source 1..31: mol_type = other RNA
agctttctgtatgggatcaggcttcaacttt

SEQ ID NO: 2118 - RNA, 31 nt, synthetic construct
  source 1..31: mol_type = other RNA
agctttctgtatgggatcaggcttccacttt

SEQ ID NO: 2119 - RNA, 31 nt, synthetic construct
  source 1..31: mol_type = other RNA
agctttctgtatgggatcaggcttcgacttt

SEQ ID NO: 2120 - RNA, 31 nt, synthetic construct
  source 1..31: mol_type = other RNA
agctttctgtatgggatcaggcttctacttt

SEQ ID NO: 2121 - RNA, 32 nt, synthetic construct
  source 1..32: mol_type = other RNA
aagctttctgtatgggatcaggctagcacttt

SEQ ID NO: 2122 - RNA, 32 nt, synthetic construct
  source 1..32: mol_type = other RNA
aagctttctgtatgggatcaggctagtacttt

SEQ ID NO: 2123 - RNA, 32 nt, synthetic construct
  source 1..32: mol_type = other RNA
aagctttctgtatgggatcaggcttcaacttt

SEQ ID NO: 2124 - RNA, 32 nt, synthetic construct
  source 1..32: mol_type = other RNA
aagctttctgtatgggatcaggcttccacttt

SEQ ID NO: 2125 - RNA, 32 nt, synthetic construct
  source 1..32: mol_type = other RNA
aagctttctgtatgggatcaggcttcgacttt

SEQ ID NO: 2126 - RNA, 32 nt, synthetic construct
  source 1..32: mol_type = other RNA
aagctttctgtatgggatcaggcttctacttt

SEQ ID NO: 2127 - RNA, 33 nt, synthetic construct
  source 1..33: mol_type = other RNA
gaagctttctgtatgggatcaggctagcacttt

SEQ ID NO: 2128 - RNA, 33 nt, synthetic construct
  source 1..33: mol_type = other RNA
gaagctttctgtatgggatcaggctagtacttt

SEQ ID NO: 2129 - RNA, 33 nt, synthetic construct
  source 1..33: mol_type = other RNA
gaagctttctgtatgggatcaggcttcaacttt

SEQ ID NO: 2130 - RNA, 33 nt, synthetic construct
  source 1..33: mol_type = other RNA
gaagctttctgtatgggatcaggcttccacttt

SEQ ID NO: 2131 - RNA, 33 nt, synthetic construct
  source 1..33: mol_type = other RNA
gaagctttctgtatgggatcaggcttcgacttt

SEQ ID NO: 2132 - RNA, 33 nt, synthetic construct
  source 1..33: mol_type = other RNA
gaagctttctgtatgggatcaggcttctacttt

SEQ ID NO: 2133 - RNA, 34 nt, synthetic construct
  source 1..34: mol_type = other RNA
agaagctttctgtatgggatcaggctagcacttt

SEQ ID NO: 2134 - RNA, 34 nt, synthetic construct
  source 1..34: mol_type = other RNA
agaagctttctgtatgggatcaggctagtacttt

SEQ ID NO: 2135 - RNA, 34 nt, synthetic construct
  source 1..34: mol_type = other RNA
agaagctttctgtatgggatcaggcttcaacttt

SEQ ID NO: 2136 - RNA, 34 nt, synthetic construct
  source 1..34: mol_type = other RNA
agaagctttctgtatgggatcaggcttccacttt

SEQ ID NO: 2137 - RNA, 34 nt, synthetic construct
  source 1..34: mol_type = other RNA
agaagctttctgtatgggatcaggcttcgacttt

SEQ ID NO: 2138 - RNA, 34 nt, synthetic construct
  source 1..34: mol_type = other RNA
agaagctttctgtatgggatcaggcttctacttt

SEQ ID NO: 2139 - RNA, 35 nt, synthetic construct
  source 1..35: mol_type = other RNA
cagaagctttctgtatgggatcaggctagcacttt

SEQ ID NO: 2140 - RNA, 35 nt, synthetic construct
  source 1..35: mol_type = other RNA
cagaagctttctgtatgggatcaggctagtacttt

SEQ ID NO: 2141 - RNA, 35 nt, synthetic construct
  source 1..35: mol_type = other RNA
cagaagctttctgtatgggatcaggcttcaacttt

SEQ ID NO: 2142 - RNA, 35 nt, synthetic construct
  source 1..35: mol_type = other RNA
cagaagctttctgtatgggatcaggcttccacttt

SEQ ID NO: 2143 - RNA, 35 nt, synthetic construct
  source 1..35: mol_type = other RNA
cagaagctttctgtatgggatcaggcttcgacttt

SEQ ID NO: 2144 - RNA, 35 nt, synthetic construct
  source 1..35: mol_type = other RNA
cagaagctttctgtatgggatcaggcttctacttt

SEQ ID NO: 2145 - RNA, 36 nt, synthetic construct
  source 1..36: mol_type = other RNA
gcagaagctttctgtatgggatcaggctagcacttt

SEQ ID NO: 2146 - RNA, 36 nt, synthetic construct
  source 1..36: mol_type = other RNA
gcagaagctttctgtatgggatcaggctagtacttt

SEQ ID NO: 2147 - RNA, 36 nt, synthetic construct
  source 1..36: mol_type = other RNA
gcagaagctttctgtatgggatcaggcttcaacttt

SEQ ID NO: 2148 - RNA, 36 nt, synthetic construct
  source 1..36: mol_type = other RNA
gcagaagctttctgtatgggatcaggcttccacttt

SEQ ID NO: 2149 - RNA, 36 nt, synthetic construct
  source 1..36: mol_type = other RNA
gcagaagctttctgtatgggatcaggcttcgacttt

SEQ ID NO: 2150 - RNA, 36 nt, synthetic construct
  source 1..36: mol_type = other RNA
gcagaagctttctgtatgggatcaggcttctacttt

SEQ ID NO: 2151 - RNA, 37 nt, synthetic construct
  source 1..37: mol_type = other RNA
tgcagaagctttctgtatgggatcaggctagcacttt

SEQ ID NO: 2152 - RNA, 37 nt, synthetic construct
  source 1..37: mol_type = other RNA
tgcagaagctttctgtatgggatcaggctagtacttt

SEQ ID NO: 2153 - RNA, 37 nt, synthetic construct
  source 1..37: mol_type = other RNA
tgcagaagctttctgtatgggatcaggcttcaacttt

SEQ ID NO: 2154 - RNA, 37 nt, synthetic construct
  source 1..37: mol_type = other RNA
tgcagaagctttctgtatgggatcaggcttccacttt

SEQ ID NO: 2155 - RNA, 37 nt, synthetic construct
  source 1..37: mol_type = other RNA
tgcagaagctttctgtatgggatcaggcttcgacttt

SEQ ID NO: 2156 - RNA, 37 nt, synthetic construct
  source 1..37: mol_type = other RNA
tgcagaagctttctgtatgggatcaggcttctacttt

SEQ ID NO: 2157 - RNA, 38 nt, synthetic construct
  source 1..38: mol_type = other RNA
atgcagaagctttctgtatgggatcaggctagcacttt

SEQ ID NO: 2158 - RNA, 38 nt, synthetic construct
  source 1..38: mol_type = other RNA
atgcagaagctttctgtatgggatcaggctagtacttt

SEQ ID NO: 2159 - RNA, 38 nt, synthetic construct
  source 1..38: mol_type = other RNA
atgcagaagctttctgtatgggatcaggcttcaacttt

SEQ ID NO: 2160 - RNA, 38 nt, synthetic construct
  source 1..38: mol_type = other RNA
atgcagaagctttctgtatgggatcaggcttccacttt

SEQ ID NO: 2161 - RNA, 38 nt, synthetic construct
  source 1..38: mol_type = other RNA
atgcagaagctttctgtatgggatcaggcttcgacttt

SEQ ID NO: 2162 - RNA, 38 nt, synthetic construct
  source 1..38: mol_type = other RNA
atgcagaagctttctgtatgggatcaggcttctacttt

SEQ ID NO: 2163 - RNA, 39 nt, synthetic construct
  source 1..39: mol_type = other RNA
gatgcagaagctttctgtatgggatcaggctagcacttt

SEQ ID NO: 2164 - RNA, 39 nt, synthetic construct
  source 1..39: mol_type = other RNA
gatgcagaagctttctgtatgggatcaggctagtacttt

SEQ ID NO: 2165 - RNA, 39 nt, synthetic construct
  source 1..39: mol_type = other RNA
gatgcagaagctttctgtatgggatcaggcttcaacttt

SEQ ID NO: 2166 - RNA, 39 nt, synthetic construct
  source 1..39: mol_type = other RNA
gatgcagaagctttctgtatgggatcaggcttccacttt

SEQ ID NO: 2167 - RNA, 39 nt, synthetic construct
  source 1..39: mol_type = other RNA
gatgcagaagctttctgtatgggatcaggcttcgacttt

SEQ ID NO: 2168 - RNA, 39 nt, synthetic construct
  source 1..39: mol_type = other RNA
gatgcagaagctttctgtatgggatcaggcttctacttt

SEQ ID NO: 2169 - RNA, 40 nt, synthetic construct
  source 1..40: mol_type = other RNA
ggatgcagaagctttctgtatgggatcaggctagcacttt

SEQ ID NO: 2170 - RNA, 40 nt, synthetic construct
  source 1..40: mol_type = other RNA
ggatgcagaagctttctgtatgggatcaggctagtacttt

SEQ ID NO: 2171 - RNA, 40 nt, synthetic construct
  source 1..40: mol_type = other RNA
ggatgcagaagctttctgtatgggatcaggcttcaacttt

SEQ ID NO: 2172 - RNA, 40 nt, synthetic construct
  source 1..40: mol_type = other RNA
ggatgcagaagctttctgtatgggatcaggcttccacttt

SEQ ID NO: 2173 - RNA, 40 nt, synthetic construct
  source 1..40: mol_type = other RNA
ggatgcagaagctttctgtatgggatcaggcttcgacttt

SEQ ID NO: 2174 - RNA, 40 nt, synthetic construct
  source 1..40: mol_type = other RNA
ggatgcagaagctttctgtatgggatcaggcttctacttt

SEQ ID NO: 2175 - RNA, 20 nt, synthetic construct
  source 1..20: mol_type = other RNA
tatgggatcaggcttcaact

SEQ ID NO: 2176 - RNA, 20 nt, synthetic construct
  source 1..20: mol_type = other RNA
tatgggatcaggcttcgact

SEQ ID NO: 2177 - RNA, 20 nt, synthetic construct
  source 1..20: mol_type = other RNA
tatgggatcaggcttctact

SEQ ID NO: 2178 - RNA, 17 nt, synthetic construct
  source 1..17: mol_type = other RNA
tcagttttggatgcaga

SEQ ID NO: 2179 - RNA, 18 nt, synthetic construct
  source 1..18: mol_type = other RNA
atcagttttggatgcaga

SEQ ID NO: 2180 - RNA, 19 nt, synthetic construct
  source 1..19: mol_type = other RNA
tatcagttttggatgcaga

SEQ ID NO: 2181 - RNA, 21 nt, synthetic construct
  source 1..21: mol_type = other RNA
attatcagttttggatgcaga

SEQ ID NO: 2182 - RNA, 22 nt, synthetic construct
  source 1..22: mol_type = other RNA
gattatcagttttggatgcaga

SEQ ID NO: 2183-2187 - skipped (5 entries)

SEQ ID NO: 2188 - RNA, 10 nt, synthetic construct
  source 1..10: mol_type = other RNA
gcatccaaaa

SEQ ID NO: 2189 - RNA, 11 nt, synthetic construct
  source 1..11: mol_type = other RNA
gcatccaaaac

SEQ ID NO: 2190 - RNA, 12 nt, synthetic construct
  source 1..12: mol_type = other RNA
gcatccaaaact

SEQ ID NO: 2191 - RNA, 13 nt, synthetic construct
  source 1..13: mol_type = other RNA
gcatccaaaactg

SEQ ID NO: 2192 - RNA, 14 nt, synthetic construct
  source 1..14: mol_type = other RNA
gcatccaaaactga

SEQ ID NO: 2193 - RNA, 15 nt, synthetic construct
  source 1..15: mol_type = other RNA
gcatccaaaactgat

SEQ ID NO: 2194 - RNA, 16 nt, synthetic construct
  source 1..16: mol_type = other RNA
gcatccaaaactgata

SEQ ID NO: 2195 - RNA, 17 nt, synthetic construct
  source 1..17: mol_type = other RNA
gcatccaaaactgataa

SEQ ID NO: 2196 - RNA, 18 nt, synthetic construct
  source 1..18: mol_type = other RNA
gcatccaaaactgataat

SEQ ID NO: 2197 - RNA, 19 nt, synthetic construct
  source 1..19: mol_type = other RNA
gcatccaaaactgataatc

SEQ ID NO: 2198 - RNA, 18 nt, synthetic construct
  source 1..18: mol_type = other RNA
cccatacagaaagcttct

SEQ ID NO: 2199 - RNA, 18 nt, synthetic construct
  source 1..18: mol_type = other RNA
cccatacagaaagtttct

SEQ ID NO: 2200 - RNA, 19 nt, synthetic construct
  source 1..19: mol_type = other RNA
tcccatacagaaagcttct

SEQ ID NO: 2201 - RNA, 19 nt, synthetic construct
  source 1..19: mol_type = other RNA
tcccatacagaaagtttct

SEQ ID NO: 2202 - RNA, 20 nt, synthetic construct
  source 1..20: mol_type = other RNA
atcccatacagaaagcttct

SEQ ID NO: 2203 - RNA, 20 nt, synthetic construct
  source 1..20: mol_type = other RNA
atcccatacagaaagtttct

SEQ ID NO: 2204 - RNA, 21 nt, synthetic construct
  source 1..21: mol_type = other RNA
gatcccatacagaaagcttct

SEQ ID NO: 2205 - RNA, 21 nt, synthetic construct
  source 1..21: mol_type = other RNA
gatcccatacagaaagtttct

SEQ ID NO: 2206 - RNA, 22 nt, synthetic construct
  source 1..22: mol_type = other RNA
tgatcccatacagaaagcttct

SEQ ID NO: 2207 - RNA, 22 nt, synthetic construct
  source 1..22: mol_type = other RNA
tgatcccatacagaaagtttct

SEQ ID NO: 2208 - RNA, 23 nt, synthetic construct
  source 1..23: mol_type = other RNA
ctgatcccatacagaaagcttct

SEQ ID NO: 2209 - RNA, 23 nt, synthetic construct
  source 1..23: mol_type = other RNA
ctgatcccatacagaaagtttct

SEQ ID NO: 2210 - RNA, 24 nt, synthetic construct
  source 1..24: mol_type = other RNA
cctgatcccatacagaaagcttct

SEQ ID NO: 2211 - RNA, 24 nt, synthetic construct
  source 1..24: mol_type = other RNA
cctgatcccatacagaaagtttct

SEQ ID NO: 2212 - RNA, 25 nt, synthetic construct
  source 1..25: mol_type = other RNA
gcctgatcccatacagaaagcttct

SEQ ID NO: 2213 - RNA, 25 nt, synthetic construct
  source 1..25: mol_type = other RNA
gcctgatcccatacagaaagtttct

SEQ ID NO: 2214 - RNA, 26 nt, synthetic construct
  source 1..26: mol_type = other RNA
agcctgatcccatacagaaagcttct

SEQ ID NO: 2215 - RNA, 26 nt, synthetic construct
  source 1..26: mol_type = other RNA
agcctgatcccatacagaaagtttct

SEQ ID NO: 2216 - RNA, 27 nt, synthetic construct
  source 1..27: mol_type = other RNA
aagcctgatcccatacagaaagcttct

SEQ ID NO: 2217 - RNA, 27 nt, synthetic construct
  source 1..27: mol_type = other RNA
aagcctgatcccatacagaaagtttct

SEQ ID NO: 2218 - RNA, 28 nt, synthetic construct
  source 1..28: mol_type = other RNA
gaagcctgatcccatacagaaagcttct

SEQ ID NO: 2219 - RNA, 28 nt, synthetic construct
  source 1..28: mol_type = other RNA
gaagcctgatcccatacagaaagtttct

SEQ ID NO: 2220 - RNA, 29 nt, synthetic construct
  source 1..29: mol_type = other RNA
ggaagcctgatcccatacagaaagcttct

SEQ ID NO: 2221 - RNA, 29 nt, synthetic construct
  source 1..29: mol_type = other RNA
ggaagcctgatcccatacagaaagtttct

SEQ ID NO: 2222 - RNA, 30 nt, synthetic construct
  source 1..30: mol_type = other RNA
tggaagcctgatcccatacagaaagcttct

SEQ ID NO: 2223 - RNA, 30 nt, synthetic construct
  source 1..30: mol_type = other RNA
tggaagcctgatcccatacagaaagtttct

SEQ ID NO: 2224 - RNA, 31 nt, synthetic construct
  source 1..31: mol_type = other RNA
gtggaagcctgatcccatacagaaagcttct

SEQ ID NO: 2225 - RNA, 31 nt, synthetic construct
  source 1..31: mol_type = other RNA
gtggaagcctgatcccatacagaaagtttct

SEQ ID NO: 2226 - RNA, 32 nt, synthetic construct
  source 1..32: mol_type = other RNA
agtggaagcctgatcccatacagaaagcttct

SEQ ID NO: 2227 - RNA, 32 nt, synthetic construct
  source 1..32: mol_type = other RNA
agtggaagcctgatcccatacagaaagtttct

SEQ ID NO: 2228 - RNA, 33 nt, synthetic construct
  source 1..33: mol_type = other RNA
aagtggaagcctgatcccatacagaaagcttct

SEQ ID NO: 2229 - RNA, 33 nt, synthetic construct
  source 1..33: mol_type = other RNA
aagtggaagcctgatcccatacagaaagtttct

SEQ ID NO: 2230 - RNA, 34 nt, synthetic construct
  source 1..34: mol_type = other RNA
aaagtggaagcctgatcccatacagaaagcttct

SEQ ID NO: 2231 - RNA, 34 nt, synthetic construct
  source 1..34: mol_type = other RNA
aaagtggaagcctgatcccatacagaaagtttct

SEQ ID NO: 2232 - RNA, 35 nt, synthetic construct
  source 1..35: mol_type = other RNA
caaagtggaagcctgatcccatacagaaagcttct

SEQ ID NO: 2233 - RNA, 35 nt, synthetic construct
  source 1..35: mol_type = other RNA
caaagtggaagcctgatcccatacagaaagtttct

SEQ ID NO: 2234 - RNA, 36 nt, synthetic construct
  source 1..36: mol_type = other RNA
ccaaagtggaagcctgatcccatacagaaagcttct

SEQ ID NO: 2235 - RNA, 36 nt, synthetic construct
  source 1..36: mol_type = other RNA
ccaaagtggaagcctgatcccatacagaaagtttct

SEQ ID NO: 2236 - RNA, 37 nt, synthetic construct
  source 1..37: mol_type = other RNA
tccaaagtggaagcctgatcccatacagaaagcttct

SEQ ID NO: 2237 - RNA, 37 nt, synthetic construct
  source 1..37: mol_type = other RNA
tccaaagtggaagcctgatcccatacagaaagtttct

SEQ ID NO: 2238 - RNA, 38 nt, synthetic construct
  source 1..38: mol_type = other RNA
ttccaaagtggaagcctgatcccatacagaaagcttct

SEQ ID NO: 2239 - RNA, 38 nt, synthetic construct
  source 1..38: mol_type = other RNA
ttccaaagtggaagcctgatcccatacagaaagtttct

SEQ ID NO: 2240 - RNA, 39 nt, synthetic construct
  source 1..39: mol_type = other RNA
tttccaaagtggaagcctgatcccatacagaaagcttct

SEQ ID NO: 2241 - RNA, 39 nt, synthetic construct
  source 1..39: mol_type = other RNA
tttccaaagtggaagcctgatcccatacagaaagtttct

SEQ ID NO: 2242 - RNA, 40 nt, synthetic construct
  source 1..40: mol_type = other RNA
gtttccaaagtggaagcctgatcccatacagaaagcttct

SEQ ID NO: 2243 - RNA, 40 nt, synthetic construct
  source 1..40: mol_type = other RNA
gtttccaaagtggaagcctgatcccatacagaaagtttct

SEQ ID NO: 2244 - RNA, 20 nt, synthetic construct
  source 1..20: mol_type = other RNA
gatcccatacagaaagtttc

SEQ ID NO: 2245 - RNA, 17 nt, synthetic construct
  source 1..17: mol_type = other RNA
ttgtgattatcagtttt

SEQ ID NO: 2246 - RNA, 18 nt, synthetic construct
  source 1..18: mol_type = other RNA
cttgtgattatcagtttt

SEQ ID NO: 2247 - RNA, 19 nt, synthetic construct
  source 1..19: mol_type = other RNA
tcttgtgattatcagtttt

SEQ ID NO: 2248 - RNA, 21 nt, synthetic construct
  source 1..21: mol_type = other RNA
tttcttgtgattatcagtttt

SEQ ID NO: 2249 - RNA, 22 nt, synthetic construct
  source 1..22: mol_type = other RNA
ctttcttgtgattatcagtttt

SEQ ID NO: 2250-2254 - skipped (5 entries)

SEQ ID NO: 2255 - RNA, 10 nt, synthetic construct
  source 1..10: mol_type = other RNA
actgataatc

SEQ ID NO: 2256 - RNA, 11 nt, synthetic construct
  source 1..11: mol_type = other RNA
actgataatca

SEQ ID NO: 2257 - RNA, 12 nt, synthetic construct
  source 1..12: mol_type = other RNA
actgataatcac

SEQ ID NO: 2258 - RNA, 13 nt, synthetic construct
  source 1..13: mol_type = other RNA
actgataatcaca

SEQ ID NO: 2259 - RNA, 14 nt, synthetic construct
  source 1..14: mol_type = other RNA
actgataatcacaa

SEQ ID NO: 2260 - RNA, 15 nt, synthetic construct
  source 1..15: mol_type = other RNA
actgataatcacaag

SEQ ID NO: 2261 - RNA, 16 nt, synthetic construct
  source 1..16: mol_type = other RNA
actgataatcacaaga

SEQ ID NO: 2262 - RNA, 17 nt, synthetic construct
  source 1..17: mol_type = other RNA
actgataatcacaagaa

SEQ ID NO: 2263 - RNA, 18 nt, synthetic construct
  source 1..18: mol_type = other RNA
actgataatcacaagaaa

SEQ ID NO: 2264 - RNA, 19 nt, synthetic construct
  source 1..19: mol_type = other RNA
actgataatcacaagaaag

SEQ ID NO: 2265 - RNA, 27 nt, synthetic construct
  source 1..27: mol_type = other RNA
cccatacagaaagcttctgcatccaaa

SEQ ID NO: 2266 - RNA, 28 nt, synthetic construct
  source 1..28: mol_type = other RNA
tcccatacagaaagcttctgcatccaaa

SEQ ID NO: 2267 - RNA, 29 nt, synthetic construct
  source 1..29: mol_type = other RNA
atcccatacagaaagcttctgcatccaaa

SEQ ID NO: 2268 - RNA, 30 nt, synthetic construct
  source 1..30: mol_type = other RNA
gatcccatacagaaagcttctgcatccaaa

SEQ ID NO: 2269 - RNA, 31 nt, synthetic construct
  source 1..31: mol_type = other RNA
tgatcccatacagaaagcttctgcatccaaa

SEQ ID NO: 2270 - RNA, 32 nt, synthetic construct
  source 1..32: mol_type = other RNA
ctgatcccatacagaaagcttctgcatccaaa

SEQ ID NO: 2271 - RNA, 33 nt, synthetic construct
  source 1..33: mol_type = other RNA
cctgatcccatacagaaagcttctgcatccaaa

SEQ ID NO: 2272 - RNA, 34 nt, synthetic construct
  source 1..34: mol_type = other RNA
gcctgatcccatacagaaagcttctgcatccaaa

SEQ ID NO: 2273 - RNA, 35 nt, synthetic construct
  source 1..35: mol_type = other RNA
agcctgatcccatacagaaagcttctgcatccaaa

SEQ ID NO: 2274 - RNA, 36 nt, synthetic construct
  source 1..36: mol_type = other RNA
aagcctgatcccatacagaaagcttctgcatccaaa

SEQ ID NO: 2275 - RNA, 37 nt, synthetic construct
  source 1..37: mol_type = other RNA
gaagcctgatcccatacagaaagcttctgcatccaaa

SEQ ID NO: 2276 - RNA, 38 nt, synthetic construct
  source 1..38: mol_type = other RNA
ggaagcctgatcccatacagaaagcttctgcatccaaa

SEQ ID NO: 2277 - RNA, 39 nt, synthetic construct
  source 1..39: mol_type = other RNA
tggaagcctgatcccatacagaaagcttctgcatccaaa

SEQ ID NO: 2278 - RNA, 40 nt, synthetic construct
  source 1..40: mol_type = other RNA
gtggaagcctgatcccatacagaaagcttctgcatccaaa

SEQ ID NO: 2279 - RNA, 17 nt, synthetic construct
  source 1..17: mol_type = other RNA
ctgggtttccaaagtgg

SEQ ID NO: 2280 - RNA, 18 nt, synthetic construct
  source 1..18: mol_type = other RNA
gctgggtttccaaagtgg

SEQ ID NO: 2281 - RNA, 19 nt, synthetic construct
  source 1..19: mol_type = other RNA
tgctgggtttccaaagtgg

SEQ ID NO: 2282 - RNA, 21 nt, synthetic construct
  source 1..21: mol_type = other RNA
cttgctgggtttccaaagtgg

SEQ ID NO: 2283 - RNA, 22 nt, synthetic construct
  source 1..22: mol_type = other RNA
tcttgctgggtttccaaagtgg

SEQ ID NO: 2284-2288 - skipped (5 entries)

SEQ ID NO: 2289 - RNA, 10 nt, synthetic construct
  source 1..10: mol_type = other RNA
ctttggaaac

SEQ ID NO: 2290 - RNA, 11 nt, synthetic construct
  source 1..11: mol_type = other RNA
ctttggaaacc

SEQ ID NO: 2291 - RNA, 12 nt, synthetic construct
  source 1..12: mol_type = other RNA
ctttggaaaccc

SEQ ID NO: 2292 - RNA, 13 nt, synthetic construct
  source 1..13: mol_type = other RNA
ctttggaaaccca

SEQ ID NO: 2293 - RNA, 14 nt, synthetic construct
  source 1..14: mol_type = other RNA
ctttggaaacccag

SEQ ID NO: 2294 - RNA, 15 nt, synthetic construct
  source 1..15: mol_type = other RNA
ctttggaaacccagc

SEQ ID NO: 2295 - RNA, 16 nt, synthetic construct
  source 1..16: mol_type = other RNA
ctttggaaacccagca

SEQ ID NO: 2296 - RNA, 17 nt, synthetic construct
  source 1..17: mol_type = other RNA
ctttggaaacccagcaa

SEQ ID NO: 2297 - RNA, 18 nt, synthetic construct
  source 1..18: mol_type = other RNA
ctttggaaacccagcaag

SEQ ID NO: 2298 - RNA, 19 nt, synthetic construct
  source 1..19: mol_type = other RNA
ctttggaaacccagcaaga

SEQ ID NO: 2299 - RNA, 13 nt, synthetic construct
  source 1..13: mol_type = other RNA
gatcaggcatcca

SEQ ID NO: 2300 - RNA, 13 nt, synthetic construct
  source 1..13: mol_type = other RNA
gatcaggcctcca

SEQ ID NO: 2301 - RNA, 13 nt, synthetic construct
  source 1..13: mol_type = other RNA
gatcaggcgtcca

SEQ ID NO: 2302 - RNA, 13 nt, synthetic construct
  source 1..13: mol_type = other RNA
gatcaggcttcca

SEQ ID NO: 2303 - RNA, 14 nt, synthetic construct
  source 1..14: mol_type = other RNA
ggatcaggcatcca

SEQ ID NO: 2304 - RNA, 14 nt, synthetic construct
  source 1..14: mol_type = other RNA
ggatcaggcctcca

SEQ ID NO: 2305 - RNA, 14 nt, synthetic construct
  source 1..14: mol_type = other RNA
ggatcaggcgtcca

SEQ ID NO: 2306 - RNA, 14 nt, synthetic construct
  source 1..14: mol_type = other RNA
ggatcaggcttcca

SEQ ID NO: 2307 - RNA, 15 nt, synthetic construct
  source 1..15: mol_type = other RNA
gggatcaggcatcca

SEQ ID NO: 2308 - RNA, 15 nt, synthetic construct
  source 1..15: mol_type = other RNA
gggatcaggcctcca

SEQ ID NO: 2309 - RNA, 15 nt, synthetic construct
  source 1..15: mol_type = other RNA
gggatcaggcgtcca

SEQ ID NO: 2310 - RNA, 15 nt, synthetic construct
  source 1..15: mol_type = other RNA
gggatcaggcttcca

SEQ ID NO: 2311 - RNA, 16 nt, synthetic construct
  source 1..16: mol_type = other RNA
tgggatcaggcatcca

SEQ ID NO: 2312 - RNA, 16 nt, synthetic construct
  source 1..16: mol_type = other RNA
tgggatcaggcctcca

SEQ ID NO: 2313 - RNA, 16 nt, synthetic construct
  source 1..16: mol_type = other RNA
tgggatcaggcgtcca

SEQ ID NO: 2314 - RNA, 16 nt, synthetic construct
  source 1..16: mol_type = other RNA
tgggatcaggcttcca

SEQ ID NO: 2315 - RNA, 17 nt, synthetic construct
  source 1..17: mol_type = other RNA
atgggatcaggcatcca

SEQ ID NO: 2316 - RNA, 17 nt, synthetic construct
  source 1..17: mol_type = other RNA
atgggatcaggcctcca

SEQ ID NO: 2317 - RNA, 17 nt, synthetic construct
  source 1..17: mol_type = other RNA
atgggatcaggcgtcca

SEQ ID NO: 2318 - RNA, 17 nt, synthetic construct
  source 1..17: mol_type = other RNA
atgggatcaggcttcca

SEQ ID NO: 2319 - RNA, 18 nt, synthetic construct
  source 1..18: mol_type = other RNA
tatgggatcaggcatcca

SEQ ID NO: 2320 - RNA, 18 nt, synthetic construct
  source 1..18: mol_type = other RNA
tatgggatcaggcctcca

SEQ ID NO: 2321 - RNA, 18 nt, synthetic construct
  source 1..18: mol_type = other RNA
tatgggatcaggcgtcca

SEQ ID NO: 2322 - RNA, 18 nt, synthetic construct
  source 1..18: mol_type = other RNA
tatgggatcaggcttcca

SEQ ID NO: 2323 - RNA, 19 nt, synthetic construct
  source 1..19: mol_type = other RNA
gtatgggatcaggcatcca

SEQ ID NO: 2324 - RNA, 19 nt, synthetic construct
  source 1..19: mol_type = other RNA
gtatgggatcaggcctcca

SEQ ID NO: 2325 - RNA, 19 nt, synthetic construct
  source 1..19: mol_type = other RNA
gtatgggatcaggcgtcca

SEQ ID NO: 2326 - RNA, 19 nt, synthetic construct
  source 1..19: mol_type = other RNA
gtatgggatcaggcttcca

SEQ ID NO: 2327 - RNA, 20 nt, synthetic construct
  source 1..20: mol_type = other RNA
tgtatgggatcaggcatcca

SEQ ID NO: 2328 - RNA, 20 nt, synthetic construct
  source 1..20: mol_type = other RNA
tgtatgggatcaggcctcca

SEQ ID NO: 2329 - RNA, 20 nt, synthetic construct
  source 1..20: mol_type = other RNA
tgtatgggatcaggcgtcca

SEQ ID NO: 2330 - RNA, 20 nt, synthetic construct
  source 1..20: mol_type = other RNA
tgtatgggatcaggcttcca

SEQ ID NO: 2331 - RNA, 21 nt, synthetic construct
  source 1..21: mol_type = other RNA
ctgtatgggatcaggcatcca

SEQ ID NO: 2332 - RNA, 21 nt, synthetic construct
  source 1..21: mol_type = other RNA
ctgtatgggatcaggcctcca

SEQ ID NO: 2333 - RNA, 21 nt, synthetic construct
  source 1..21: mol_type = other RNA
ctgtatgggatcaggcgtcca

SEQ ID NO: 2334 - RNA, 21 nt, synthetic construct
  source 1..21: mol_type = other RNA
ctgtatgggatcaggcttcca

SEQ ID NO: 2335 - RNA, 22 nt, synthetic construct
  source 1..22: mol_type = other RNA
tctgtatgggatcaggcatcca

SEQ ID NO: 2336 - RNA, 22 nt, synthetic construct
  source 1..22: mol_type = other RNA
tctgtatgggatcaggcctcca

SEQ ID NO: 2337 - RNA, 22 nt, synthetic construct
  source 1..22: mol_type = other RNA
tctgtatgggatcaggcgtcca

SEQ ID NO: 2338 - RNA, 22 nt, synthetic construct
  source 1..22: mol_type = other RNA
tctgtatgggatcaggcttcca

SEQ ID NO: 2339 - RNA, 23 nt, synthetic construct
  source 1..23: mol_type = other RNA
ttctgtatgggatcaggcatcca

SEQ ID NO: 2340 - RNA, 23 nt, synthetic construct
  source 1..23: mol_type = other RNA
ttctgtatgggatcaggcctcca

SEQ ID NO: 2341 - RNA, 23 nt, synthetic construct
  source 1..23: mol_type = other RNA
ttctgtatgggatcaggcgtcca

SEQ ID NO: 2342 - RNA, 23 nt, synthetic construct
  source 1..23: mol_type = other RNA
ttctgtatgggatcaggcttcca

SEQ ID NO: 2343 - RNA, 24 nt, synthetic construct
  source 1..24: mol_type = other RNA
tttctgtatgggatcaggcatcca

SEQ ID NO: 2344 - RNA, 24 nt, synthetic construct
  source 1..24: mol_type = other RNA
tttctgtatgggatcaggcctcca

SEQ ID NO: 2345 - RNA, 24 nt, synthetic construct
  source 1..24: mol_type = other RNA
tttctgtatgggatcaggcgtcca

SEQ ID NO: 2346 - RNA, 24 nt, synthetic construct
  source 1..24: mol_type = other RNA
tttctgtatgggatcaggcttcca

SEQ ID NO: 2347 - RNA, 25 nt, synthetic construct
  source 1..25: mol_type = other RNA
ctttctgtatgggatcaggcatcca

SEQ ID NO: 2348 - RNA, 25 nt, synthetic construct
  source 1..25: mol_type = other RNA
ctttctgtatgggatcaggcctcca

SEQ ID NO: 2349 - RNA, 25 nt, synthetic construct
  source 1..25: mol_type = other RNA
ctttctgtatgggatcaggcgtcca

SEQ ID NO: 2350 - RNA, 25 nt, synthetic construct
  source 1..25: mol_type = other RNA
ctttctgtatgggatcaggcttcca

SEQ ID NO: 2351 - RNA, 26 nt, synthetic construct
  source 1..26: mol_type = other RNA
gctttctgtatgggatcaggcatcca

SEQ ID NO: 2352 - RNA, 26 nt, synthetic construct
  source 1..26: mol_type = other RNA
gctttctgtatgggatcaggcctcca

SEQ ID NO: 2353 - RNA, 26 nt, synthetic construct
  source 1..26: mol_type = other RNA
gctttctgtatgggatcaggcgtcca

SEQ ID NO: 2354 - RNA, 26 nt, synthetic construct
  source 1..26: mol_type = other RNA
gctttctgtatgggatcaggcttcca

SEQ ID NO: 2355 - RNA, 27 nt, synthetic construct
  source 1..27: mol_type = other RNA
agctttctgtatgggatcaggcatcca

SEQ ID NO: 2356 - RNA, 27 nt, synthetic construct
  source 1..27: mol_type = other RNA
agctttctgtatgggatcaggcctcca

SEQ ID NO: 2357 - RNA, 27 nt, synthetic construct
  source 1..27: mol_type = other RNA
agctttctgtatgggatcaggcgtcca

SEQ ID NO: 2358 - RNA, 27 nt, synthetic construct
  source 1..27: mol_type = other RNA
agctttctgtatgggatcaggcttcca

SEQ ID NO: 2359 - RNA, 28 nt, synthetic construct
  source 1..28: mol_type = other RNA
aagctttctgtatgggatcaggcatcca

SEQ ID NO: 2360 - RNA, 28 nt, synthetic construct
  source 1..28: mol_type = other RNA
aagctttctgtatgggatcaggcctcca

SEQ ID NO: 2361 - RNA, 28 nt, synthetic construct
  source 1..28: mol_type = other RNA
aagctttctgtatgggatcaggcgtcca

SEQ ID NO: 2362 - RNA, 28 nt, synthetic construct
  source 1..28: mol_type = other RNA
aagctttctgtatgggatcaggcttcca

SEQ ID NO: 2363 - RNA, 29 nt, synthetic construct
  source 1..29: mol_type = other RNA
gaagctttctgtatgggatcaggcatcca

SEQ ID NO: 2364 - RNA, 29 nt, synthetic construct
  source 1..29: mol_type = other RNA
gaagctttctgtatgggatcaggcctcca

SEQ ID NO: 2365 - RNA, 29 nt, synthetic construct
  source 1..29: mol_type = other RNA
gaagctttctgtatgggatcaggcgtcca

SEQ ID NO: 2366 - RNA, 29 nt, synthetic construct
  source 1..29: mol_type = other RNA
gaagctttctgtatgggatcaggcttcca

SEQ ID NO: 2367 - RNA, 30 nt, synthetic construct
  source 1..30: mol_type = other RNA
agaagctttctgtatgggatcaggcatcca

SEQ ID NO: 2368 - RNA, 30 nt, synthetic construct
  source 1..30: mol_type = other RNA
agaagctttctgtatgggatcaggcctcca

SEQ ID NO: 2369 - RNA, 30 nt, synthetic construct
  source 1..30: mol_type = other RNA
agaagctttctgtatgggatcaggcgtcca

SEQ ID NO: 2370 - RNA, 30 nt, synthetic construct
  source 1..30: mol_type = other RNA
agaagctttctgtatgggatcaggcttcca

SEQ ID NO: 2371 - RNA, 31 nt, synthetic construct
  source 1..31: mol_type = other RNA
cagaagctttctgtatgggatcaggcatcca

SEQ ID NO: 2372 - RNA, 31 nt, synthetic construct
  source 1..31: mol_type = other RNA
cagaagctttctgtatgggatcaggcctcca

SEQ ID NO: 2373 - RNA, 31 nt, synthetic construct
  source 1..31: mol_type = other RNA
cagaagctttctgtatgggatcaggcgtcca

SEQ ID NO: 2374 - RNA, 31 nt, synthetic construct
  source 1..31: mol_type = other RNA
cagaagctttctgtatgggatcaggcttcca

SEQ ID NO: 2375 - RNA, 32 nt, synthetic construct
  source 1..32: mol_type = other RNA
gcagaagctttctgtatgggatcaggcatcca

SEQ ID NO: 2376 - RNA, 32 nt, synthetic construct
  source 1..32: mol_type = other RNA
gcagaagctttctgtatgggatcaggcctcca

SEQ ID NO: 2377 - RNA, 32 nt, synthetic construct
  source 1..32: mol_type = other RNA
gcagaagctttctgtatgggatcaggcgtcca

SEQ ID NO: 2378 - RNA, 32 nt, synthetic construct
  source 1..32: mol_type = other RNA
gcagaagctttctgtatgggatcaggcttcca

SEQ ID NO: 2379 - RNA, 33 nt, synthetic construct
  source 1..33: mol_type = other RNA
tgcagaagctttctgtatgggatcaggcatcca

SEQ ID NO: 2380 - RNA, 33 nt, synthetic construct
  source 1..33: mol_type = other RNA
tgcagaagctttctgtatgggatcaggcctcca

SEQ ID NO: 2381 - RNA, 33 nt, synthetic construct
  source 1..33: mol_type = other RNA
tgcagaagctttctgtatgggatcaggcgtcca

SEQ ID NO: 2382 - RNA, 33 nt, synthetic construct
  source 1..33: mol_type = other RNA
tgcagaagctttctgtatgggatcaggcttcca

SEQ ID NO: 2383 - RNA, 34 nt, synthetic construct
  source 1..34: mol_type = other RNA
atgcagaagctttctgtatgggatcaggcatcca

SEQ ID NO: 2384 - RNA, 34 nt, synthetic construct
  source 1..34: mol_type = other RNA
atgcagaagctttctgtatgggatcaggcctcca

SEQ ID NO: 2385 - RNA, 34 nt, synthetic construct
  source 1..34: mol_type = other RNA
atgcagaagctttctgtatgggatcaggcgtcca

SEQ ID NO: 2386 - RNA, 34 nt, synthetic construct
  source 1..34: mol_type = other RNA
atgcagaagctttctgtatgggatcaggcttcca

SEQ ID NO: 2387 - RNA, 35 nt, synthetic construct
  source 1..35: mol_type = other RNA
gatgcagaagctttctgtatgggatcaggcatcca

SEQ ID NO: 2388 - RNA, 35 nt, synthetic construct
  source 1..35: mol_type = other RNA
gatgcagaagctttctgtatgggatcaggcctcca

SEQ ID NO: 2389 - RNA, 35 nt, synthetic construct
  source 1..35: mol_type = other RNA
gatgcagaagctttctgtatgggatcaggcgtcca

SEQ ID NO: 2390 - RNA, 35 nt, synthetic construct
  source 1..35: mol_type = other RNA
gatgcagaagctttctgtatgggatcaggcttcca

SEQ ID NO: 2391 - RNA, 36 nt, synthetic construct
  source 1..36: mol_type = other RNA
ggatgcagaagctttctgtatgggatcaggcatcca

SEQ ID NO: 2392 - RNA, 36 nt, synthetic construct
  source 1..36: mol_type = other RNA
ggatgcagaagctttctgtatgggatcaggcctcca

SEQ ID NO: 2393 - RNA, 36 nt, synthetic construct
  source 1..36: mol_type = other RNA
ggatgcagaagctttctgtatgggatcaggcgtcca

SEQ ID NO: 2394 - RNA, 36 nt, synthetic construct
  source 1..36: mol_type = other RNA
ggatgcagaagctttctgtatgggatcaggcttcca

SEQ ID NO: 2395 - RNA, 37 nt, synthetic construct
  source 1..37: mol_type = other RNA
tggatgcagaagctttctgtatgggatcaggcatcca

SEQ ID NO: 2396 - RNA, 37 nt, synthetic construct
  source 1..37: mol_type = other RNA
tggatgcagaagctttctgtatgggatcaggcctcca

SEQ ID NO: 2397 - RNA, 37 nt, synthetic construct
  source 1..37: mol_type = other RNA
tggatgcagaagctttctgtatgggatcaggcgtcca

SEQ ID NO: 2398 - RNA, 37 nt, synthetic construct
  source 1..37: mol_type = other RNA
tggatgcagaagctttctgtatgggatcaggcttcca

SEQ ID NO: 2399 - RNA, 38 nt, synthetic construct
  source 1..38: mol_type = other RNA
ttggatgcagaagctttctgtatgggatcaggcatcca

SEQ ID NO: 2400 - RNA, 38 nt, synthetic construct
  source 1..38: mol_type = other RNA
ttggatgcagaagctttctgtatgggatcaggcctcca

SEQ ID NO: 2401 - RNA, 38 nt, synthetic construct
  source 1..38: mol_type = other RNA
ttggatgcagaagctttctgtatgggatcaggcgtcca

SEQ ID NO: 2402 - RNA, 38 nt, synthetic construct
  source 1..38: mol_type = other RNA
ttggatgcagaagctttctgtatgggatcaggcttcca

SEQ ID NO: 2403 - RNA, 39 nt, synthetic construct
  source 1..39: mol_type = other RNA
tttggatgcagaagctttctgtatgggatcaggcatcca

SEQ ID NO: 2404 - RNA, 39 nt, synthetic construct
  source 1..39: mol_type = other RNA
tttggatgcagaagctttctgtatgggatcaggcctcca

SEQ ID NO: 2405 - RNA, 39 nt, synthetic construct
  source 1..39: mol_type = other RNA
tttggatgcagaagctttctgtatgggatcaggcgtcca

SEQ ID NO: 2406 - RNA, 39 nt, synthetic construct
  source 1..39: mol_type = other RNA
tttggatgcagaagctttctgtatgggatcaggcttcca

SEQ ID NO: 2407 - RNA, 40 nt, synthetic construct
  source 1..40: mol_type = other RNA
ttttggatgcagaagctttctgtatgggatcaggcatcca

SEQ ID NO: 2408 - RNA, 40 nt, synthetic construct
  source 1..40: mol_type = other RNA
ttttggatgcagaagctttctgtatgggatcaggcctcca

SEQ ID NO: 2409 - RNA, 40 nt, synthetic construct
  source 1..40: mol_type = other RNA
ttttggatgcagaagctttctgtatgggatcaggcgtcca

SEQ ID NO: 2410 - RNA, 40 nt, synthetic construct
  source 1..40: mol_type = other RNA
ttttggatgcagaagctttctgtatgggatcaggcttcca

SEQ ID NO: 2411 - RNA, 17 nt, synthetic construct
  source 1..17: mol_type = other RNA
tgattatcagttttgga

SEQ ID NO: 2412 - RNA, 18 nt, synthetic construct
  source 1..18: mol_type = other RNA
gtgattatcagttttgga

SEQ ID NO: 2413 - RNA, 19 nt, synthetic construct
  source 1..19: mol_type = other RNA
tgtgattatcagttttgga

SEQ ID NO: 2414 - RNA, 21 nt, synthetic construct
  source 1..21: mol_type = other RNA
cttgtgattatcagttttgga

SEQ ID NO: 2415 - RNA, 22 nt, synthetic construct
  source 1..22: mol_type = other RNA
tcttgtgattatcagttttgga

SEQ ID NO: 2416-2420 - skipped (5 entries)

SEQ ID NO: 2421 - RNA, 10 nt, synthetic construct
  source 1..10: mol_type = other RNA
aaaactgata

SEQ ID NO: 2422 - RNA, 11 nt, synthetic construct
  source 1..11: mol_type = other RNA
aaaactgataa

SEQ ID NO: 2423 - RNA, 12 nt, synthetic construct
  source 1..12: mol_type = other RNA
aaaactgataat

SEQ ID NO: 2424 - RNA, 13 nt, synthetic construct
  source 1..13: mol_type = other RNA
aaaactgataatc

SEQ ID NO: 2425 - RNA, 14 nt, synthetic construct
  source 1..14: mol_type = other RNA
aaaactgataatca

SEQ ID NO: 2426 - RNA, 15 nt, synthetic construct
  source 1..15: mol_type = other RNA
aaaactgataatcac

SEQ ID NO: 2427 - RNA, 16 nt, synthetic construct
  source 1..16: mol_type = other RNA
aaaactgataatcaca

SEQ ID NO: 2428 - RNA, 17 nt, synthetic construct
  source 1..17: mol_type = other RNA
aaaactgataatcacaa

SEQ ID NO: 2429 - RNA, 18 nt, synthetic construct
  source 1..18: mol_type = other RNA
aaaactgataatcacaag

SEQ ID NO: 2430 - RNA, 19 nt, synthetic construct
  source 1..19: mol_type = other RNA
aaaactgataatcacaaga

SEQ ID NO: 2431 - RNA, 24 nt, synthetic construct
  source 1..24: mol_type = other RNA
cccatacagaaagcttctgcatcc

SEQ ID NO: 2432 - RNA, 25 nt, synthetic construct
  source 1..25: mol_type = other RNA
tcccatacagaaagcttctgcatcc

SEQ ID NO: 2433 - RNA, 26 nt, synthetic construct
  source 1..26: mol_type = other RNA
atcccatacagaaagcttctgcatcc

SEQ ID NO: 2434 - RNA, 27 nt, synthetic construct
  source 1..27: mol_type = other RNA
gatcccatacagaaagcttctgcatcc

SEQ ID NO: 2435 - RNA, 28 nt, synthetic construct
  source 1..28: mol_type = other RNA
tgatcccatacagaaagcttctgcatcc

SEQ ID NO: 2436 - RNA, 29 nt, synthetic construct
  source 1..29: mol_type = other RNA
ctgatcccatacagaaagcttctgcatcc

SEQ ID NO: 2437 - RNA, 30 nt, synthetic construct
  source 1..30: mol_type = other RNA
cctgatcccatacagaaagcttctgcatcc

SEQ ID NO: 2438 - RNA, 31 nt, synthetic construct
  source 1..31: mol_type = other RNA
gcctgatcccatacagaaagcttctgcatcc

SEQ ID NO: 2439 - RNA, 32 nt, synthetic construct
  source 1..32: mol_type = other RNA
agcctgatcccatacagaaagcttctgcatcc

SEQ ID NO: 2440 - RNA, 33 nt, synthetic construct
  source 1..33: mol_type = other RNA
aagcctgatcccatacagaaagcttctgcatcc

SEQ ID NO: 2441 - RNA, 34 nt, synthetic construct
  source 1..34: mol_type = other RNA
gaagcctgatcccatacagaaagcttctgcatcc

SEQ ID NO: 2442 - RNA, 35 nt, synthetic construct
  source 1..35: mol_type = other RNA
ggaagcctgatcccatacagaaagcttctgcatcc

SEQ ID NO: 2443 - RNA, 36 nt, synthetic construct
  source 1..36: mol_type = other RNA
tggaagcctgatcccatacagaaagcttctgcatcc

SEQ ID NO: 2444 - RNA, 37 nt, synthetic construct
  source 1..37: mol_type = other RNA
gtggaagcctgatcccatacagaaagcttctgcatcc

SEQ ID NO: 2445 - RNA, 38 nt, synthetic construct
  source 1..38: mol_type = other RNA
agtggaagcctgatcccatacagaaagcttctgcatcc

SEQ ID NO: 2446 - RNA, 39 nt, synthetic construct
  source 1..39: mol_type = other RNA
aagtggaagcctgatcccatacagaaagcttctgcatcc

SEQ ID NO: 2447 - RNA, 40 nt, synthetic construct
  source 1..40: mol_type = other RNA
aaagtggaagcctgatcccatacagaaagcttctgcatcc

SEQ ID NO: 2448 - RNA, 17 nt, synthetic construct
  source 1..17: mol_type = other RNA
cttgtgattatcagttt

SEQ ID NO: 2449 - RNA, 18 nt, synthetic construct
  source 1..18: mol_type = other RNA
tcttgtgattatcagttt

SEQ ID NO: 2450 - RNA, 19 nt, synthetic construct
  source 1..19: mol_type = other RNA
ttcttgtgattatcagttt

SEQ ID NO: 2451 - RNA, 21 nt, synthetic construct
  source 1..21: mol_type = other RNA
ctttcttgtgattatcagttt

SEQ ID NO: 2452 - RNA, 22 nt, synthetic construct
  source 1..22: mol_type = other RNA
tctttcttgtgattatcagttt

SEQ ID NO: 2453-2457 - skipped (5 entries)

SEQ ID NO: 2458 - RNA, 10 nt, synthetic construct
  source 1..10: mol_type = other RNA
ctgataatca

SEQ ID NO: 2459 - RNA, 11 nt, synthetic construct
  source 1..11: mol_type = other RNA
ctgataatcac

SEQ ID NO: 2460 - RNA, 12 nt, synthetic construct
  source 1..12: mol_type = other RNA
ctgataatcaca

SEQ ID NO: 2461 - RNA, 13 nt, synthetic construct
  source 1..13: mol_type = other RNA
ctgataatcacaa

SEQ ID NO: 2462 - RNA, 14 nt, synthetic construct
  source 1..14: mol_type = other RNA
ctgataatcacaag

SEQ ID NO: 2463 - RNA, 15 nt, synthetic construct
  source 1..15: mol_type = other RNA
ctgataatcacaaga

SEQ ID NO: 2464 - RNA, 16 nt, synthetic construct
  source 1..16: mol_type = other RNA
ctgataatcacaagaa

SEQ ID NO: 2465 - RNA, 17 nt, synthetic construct
  source 1..17: mol_type = other RNA
ctgataatcacaagaaa

SEQ ID NO: 2466 - RNA, 18 nt, synthetic construct
  source 1..18: mol_type = other RNA
ctgataatcacaagaaag

SEQ ID NO: 2467 - RNA, 19 nt, synthetic construct
  source 1..19: mol_type = other RNA
ctgataatcacaagaaaga

SEQ ID NO: 2468 - RNA, 28 nt, synthetic construct
  source 1..28: mol_type = other RNA
cccatacagaaagcttctgcatccaaaa

SEQ ID NO: 2469 - RNA, 29 nt, synthetic construct
  source 1..29: mol_type = other RNA
tcccatacagaaagcttctgcatccaaaa

SEQ ID NO: 2470 - RNA, 30 nt, synthetic construct
  source 1..30: mol_type = other RNA
atcccatacagaaagcttctgcatccaaaa

SEQ ID NO: 2471 - RNA, 31 nt, synthetic construct
  source 1..31: mol_type = other RNA
gatcccatacagaaagcttctgcatccaaaa

SEQ ID NO: 2472 - RNA, 32 nt, synthetic construct
  source 1..32: mol_type = other RNA
tgatcccatacagaaagcttctgcatccaaaa

SEQ ID NO: 2473 - RNA, 33 nt, synthetic construct
  source 1..33: mol_type = other RNA
ctgatcccatacagaaagcttctgcatccaaaa

SEQ ID NO: 2474 - RNA, 34 nt, synthetic construct
  source 1..34: mol_type = other RNA
cctgatcccatacagaaagcttctgcatccaaaa

SEQ ID NO: 2475 - RNA, 35 nt, synthetic construct
  source 1..35: mol_type = other RNA
gcctgatcccatacagaaagcttctgcatccaaaa

SEQ ID NO: 2476 - RNA, 36 nt, synthetic construct
  source 1..36: mol_type = other RNA
agcctgatcccatacagaaagcttctgcatccaaaa

SEQ ID NO: 2477 - RNA, 37 nt, synthetic construct
  source 1..37: mol_type = other RNA
aagcctgatcccatacagaaagcttctgcatccaaaa

SEQ ID NO: 2478 - RNA, 38 nt, synthetic construct
  source 1..38: mol_type = other RNA
gaagcctgatcccatacagaaagcttctgcatccaaaa

SEQ ID NO: 2479 - RNA, 39 nt, synthetic construct
  source 1..39: mol_type = other RNA
ggaagcctgatcccatacagaaagcttctgcatccaaaa

SEQ ID NO: 2480 - RNA, 40 nt, synthetic construct
  source 1..40: mol_type = other RNA
tggaagcctgatcccatacagaaagcttctgcatccaaaa

SEQ ID NO: 2481 - RNA, 17 nt, synthetic construct
  source 1..17: mol_type = other RNA
tggatgcagaagctttc

SEQ ID NO: 2482 - RNA, 18 nt, synthetic construct
  source 1..18: mol_type = other RNA
ttggatgcagaagctttc

SEQ ID NO: 2483 - RNA, 19 nt, synthetic construct
  source 1..19: mol_type = other RNA
tttggatgcagaagctttc

SEQ ID NO: 2484 - RNA, 21 nt, synthetic construct
  source 1..21: mol_type = other RNA
gttttggatgcagaagctttc

SEQ ID NO: 2485 - RNA, 22 nt, synthetic construct
  source 1..22: mol_type = other RNA
agttttggatgcagaagctttc

SEQ ID NO: 2486-2490 - skipped (5 entries)

SEQ ID NO: 2491 - RNA, 10 nt, synthetic construct
  source 1..10: mol_type = other RNA
agcttctgca

SEQ ID NO: 2492 - RNA, 11 nt, synthetic construct
  source 1..11: mol_type = other RNA
agcttctgcat

SEQ ID NO: 2493 - RNA, 12 nt, synthetic construct
  source 1..12: mol_type = other RNA
agcttctgcatc

SEQ ID NO: 2494 - RNA, 13 nt, synthetic construct
  source 1..13: mol_type = other RNA
agcttctgcatcc

SEQ ID NO: 2495 - RNA, 14 nt, synthetic construct
  source 1..14: mol_type = other RNA
agcttctgcatcca

SEQ ID NO: 2496 - RNA, 15 nt, synthetic construct
  source 1..15: mol_type = other RNA
agcttctgcatccaa

SEQ ID NO: 2497 - RNA, 16 nt, synthetic construct
  source 1..16: mol_type = other RNA
agcttctgcatccaaa

SEQ ID NO: 2498 - RNA, 17 nt, synthetic construct
  source 1..17: mol_type = other RNA
agcttctgcatccaaaa

SEQ ID NO: 2499 - RNA, 18 nt, synthetic construct
  source 1..18: mol_type = other RNA
agcttctgcatccaaaac

SEQ ID NO: 2500 - RNA, 19 nt, synthetic construct
  source 1..19: mol_type = other RNA
agcttctgcatccaaaact

SEQ ID NO: 2501 - RNA, 11 nt, synthetic construct
  source 1..11: mol_type = other RNA
cccatacagaa

SEQ ID NO: 2502 - RNA, 12 nt, synthetic construct
  source 1..12: mol_type = other RNA
tcccatacagaa

SEQ ID NO: 2503 - RNA, 13 nt, synthetic construct
  source 1..13: mol_type = other RNA
atcccatacagaa

SEQ ID NO: 2504 - RNA, 14 nt, synthetic construct
  source 1..14: mol_type = other RNA
gatcccatacagaa

SEQ ID NO: 2505 - RNA, 15 nt, synthetic construct
  source 1..15: mol_type = other RNA
tgatcccatacagaa

SEQ ID NO: 2506 - RNA, 16 nt, synthetic construct
  source 1..16: mol_type = other RNA
ctgatcccatacagaa

SEQ ID NO: 2507 - RNA, 17 nt, synthetic construct
  source 1..17: mol_type = other RNA
cctgatcccatacagaa

SEQ ID NO: 2508 - RNA, 18 nt, synthetic construct
  source 1..18: mol_type = other RNA
gcctgatcccatacagaa

SEQ ID NO: 2509 - RNA, 19 nt, synthetic construct
  source 1..19: mol_type = other RNA
agcctgatcccatacagaa

SEQ ID NO: 2510 - RNA, 21 nt, synthetic construct
  source 1..21: mol_type = other RNA
gaagcctgatcccatacagaa

SEQ ID NO: 2511 - RNA, 22 nt, synthetic construct
  source 1..22: mol_type = other RNA
ggaagcctgatcccatacagaa

SEQ ID NO: 2512 - RNA, 23 nt, synthetic construct
  source 1..23: mol_type = other RNA
tggaagcctgatcccatacagaa

SEQ ID NO: 2513 - RNA, 24 nt, synthetic construct
  source 1..24: mol_type = other RNA
gtggaagcctgatcccatacagaa

SEQ ID NO: 2514 - RNA, 25 nt, synthetic construct
  source 1..25: mol_type = other RNA
agtggaagcctgatcccatacagaa

SEQ ID NO: 2515 - RNA, 26 nt, synthetic construct
  source 1..26: mol_type = other RNA
aagtggaagcctgatcccatacagaa

SEQ ID NO: 2516 - RNA, 27 nt, synthetic construct
  source 1..27: mol_type = other RNA
aaagtggaagcctgatcccatacagaa

SEQ ID NO: 2517 - RNA, 28 nt, synthetic construct
  source 1..28: mol_type = other RNA
caaagtggaagcctgatcccatacagaa

SEQ ID NO: 2518 - RNA, 29 nt, synthetic construct
  source 1..29: mol_type = other RNA
ccaaagtggaagcctgatcccatacagaa

SEQ ID NO: 2519 - RNA, 30 nt, synthetic construct
  source 1..30: mol_type = other RNA
tccaaagtggaagcctgatcccatacagaa

SEQ ID NO: 2520 - RNA, 31 nt, synthetic construct
  source 1..31: mol_type = other RNA
ttccaaagtggaagcctgatcccatacagaa

SEQ ID NO: 2521 - RNA, 32 nt, synthetic construct
  source 1..32: mol_type = other RNA
tttccaaagtggaagcctgatcccatacagaa

SEQ ID NO: 2522 - RNA, 33 nt, synthetic construct
  source 1..33: mol_type = other RNA
gtttccaaagtggaagcctgatcccatacagaa

SEQ ID NO: 2523 - RNA, 34 nt, synthetic construct
  source 1..34: mol_type = other RNA
ggtttccaaagtggaagcctgatcccatacagaa

SEQ ID NO: 2524 - RNA, 35 nt, synthetic construct
  source 1..35: mol_type = other RNA
gggtttccaaagtggaagcctgatcccatacagaa

SEQ ID NO: 2525 - RNA, 36 nt, synthetic construct
  source 1..36: mol_type = other RNA
tgggtttccaaagtggaagcctgatcccatacagaa

SEQ ID NO: 2526 - RNA, 37 nt, synthetic construct
  source 1..37: mol_type = other RNA
ctgggtttccaaagtggaagcctgatcccatacagaa

SEQ ID NO: 2527 - RNA, 38 nt, synthetic construct
  source 1..38: mol_type = other RNA
gctgggtttccaaagtggaagcctgatcccatacagaa

SEQ ID NO: 2528 - RNA, 39 nt, synthetic construct
  source 1..39: mol_type = other RNA
tgctgggtttccaaagtggaagcctgatcccatacagaa

SEQ ID NO: 2529 - RNA, 40 nt, synthetic construct
  source 1..40: mol_type = other RNA
ttgctgggtttccaaagtggaagcctgatcccatacagaa

SEQ ID NO: 2530 - RNA, 17 nt, synthetic construct
  source 1..17: mol_type = other RNA
gtcttgggtatgcacct

SEQ ID NO: 2531 - RNA, 18 nt, synthetic construct
  source 1..18: mol_type = other RNA
ggtcttgggtatgcacct

SEQ ID NO: 2532 - RNA, 19 nt, synthetic construct
  source 1..19: mol_type = other RNA
aggtcttgggtatgcacct

SEQ ID NO: 2533 - RNA, 20 nt, synthetic construct
  source 1..20: mol_type = other RNA
aaggtcttgggtatgcacct

SEQ ID NO: 2534 - RNA, 21 nt, synthetic construct
  source 1..21: mol_type = other RNA
caaggtcttgggtatgcacct

SEQ ID NO: 2535 - RNA, 22 nt, synthetic construct
  source 1..22: mol_type = other RNA
tcaaggtcttgggtatgcacct

SEQ ID NO: 2536-2540 - skipped (5 entries)

SEQ ID NO: 2541 - RNA, 10 nt, synthetic construct
  source 1..10: mol_type = other RNA
tgcataccca

SEQ ID NO: 2542 - RNA, 11 nt, synthetic construct
  source 1..11: mol_type = other RNA
tgcatacccaa

SEQ ID NO: 2543 - RNA, 12 nt, synthetic construct
  source 1..12: mol_type = other RNA
tgcatacccaag

SEQ ID NO: 2544 - RNA, 13 nt, synthetic construct
  source 1..13: mol_type = other RNA
tgcatacccaaga

SEQ ID NO: 2545 - RNA, 14 nt, synthetic construct
  source 1..14: mol_type = other RNA
tgcatacccaagac

SEQ ID NO: 2546 - RNA, 15 nt, synthetic construct
  source 1..15: mol_type = other RNA
tgcatacccaagacc

SEQ ID NO: 2547 - RNA, 16 nt, synthetic construct
  source 1..16: mol_type = other RNA
tgcatacccaagacct

SEQ ID NO: 2548 - RNA, 17 nt, synthetic construct
  source 1..17: mol_type = other RNA
tgcatacccaagacctt

SEQ ID NO: 2549 - RNA, 18 nt, synthetic construct
  source 1..18: mol_type = other RNA
tgcatacccaagaccttg

SEQ ID NO: 2550 - RNA, 19 nt, synthetic construct
  source 1..19: mol_type = other RNA
tgcatacccaagaccttga

SEQ ID NO: 2551 - RNA, 37 nt, synthetic construct
  source 1..37: mol_type = other RNA
tcacatttttaagcaaaccaggatagtaatctatagg

SEQ ID NO: 2552 - RNA, 37 nt, synthetic construct
  source 1..37: mol_type = other RNA
tcacatttttaagcaaaccaggatagtagtctatagg

SEQ ID NO: 2553 - RNA, 38 nt, synthetic construct
  source 1..38: mol_type = other RNA
ctcacatttttaagcaaaccaggatagtaatctatagg

SEQ ID NO: 2554 - RNA, 38 nt, synthetic construct
  source 1..38: mol_type = other RNA
ctcacatttttaagcaaaccaggatagtagtctatagg

SEQ ID NO: 2555 - RNA, 39 nt, synthetic construct
  source 1..39: mol_type = other RNA
actcacatttttaagcaaaccaggatagtaatctatagg

SEQ ID NO: 2556 - RNA, 39 nt, synthetic construct
  source 1..39: mol_type = other RNA
actcacatttttaagcaaaccaggatagtagtctatagg

SEQ ID NO: 2557 - RNA, 40 nt, synthetic construct
  source 1..40: mol_type = other RNA
tactcacatttttaagcaaaccaggatagtaatctatagg

SEQ ID NO: 2558 - RNA, 40 nt, synthetic construct
  source 1..40: mol_type = other RNA
tactcacatttttaagcaaaccaggatagtagtctatagg

SEQ ID NO: 2559 - RNA, 20 nt, synthetic construct
  source 1..20: mol_type = other RNA
aaacatctcttctggaggac

SEQ ID NO: 2560 - RNA, 20 nt, synthetic construct
  source 1..20: mol_type = other RNA
actcacatttttaagcaaac

SEQ ID NO: 2561 - RNA, 20 nt, synthetic construct
  source 1..20: mol_type = other RNA
atttttaagcaaaccaggat

SEQ ID NO: 2562 - RNA, 20 nt, synthetic construct
  source 1..20: mol_type = other RNA
cacatttttaagcaaaccag

SEQ ID NO: 2563 - RNA, 20 nt, synthetic construct
  source 1..20: mol_type = other RNA
cattaaacatttcaaaagtg

SEQ ID NO: 2564 - RNA, 20 nt, synthetic construct
  source 1..20: mol_type = other RNA
cattcagcattaaacatttc

SEQ ID NO: 2565 - RNA, 20 nt, synthetic construct
  source 1..20: mol_type = other RNA
catttcaaaagtgataaatt

SEQ ID NO: 2566 - RNA, 20 nt, synthetic construct
  source 1..20: mol_type = other RNA
gcaaaccaggatagtaatct

SEQ ID NO: 2567 - RNA, 20 nt, synthetic construct
  source 1..20: mol_type = other RNA
gcaaaccaggatagtagtct

SEQ ID NO: 2568 - RNA, 20 nt, synthetic construct
  source 1..20: mol_type = other RNA
tatttccatttactcttttt

SEQ ID NO: 2569 - RNA, 20 nt, synthetic construct
  source 1..20: mol_type = other RNA
tcagcattaaacatttcaaa

SEQ ID NO: 2570 - RNA, 17 nt, synthetic construct
  source 1..17: mol_type = other RNA
attaaacatttcaaaag

SEQ ID NO: 2571 - RNA, 18 nt, synthetic construct
  source 1..18: mol_type = other RNA
cattaaacatttcaaaag

SEQ ID NO: 2572 - RNA, 19 nt, synthetic construct
  source 1..19: mol_type = other RNA
gcattaaacatttcaaaag

SEQ ID NO: 2573 - RNA, 20 nt, synthetic construct
  source 1..20: mol_type = other RNA
agcattaaacatttcaaaag

SEQ ID NO: 2574 - RNA, 21 nt, synthetic construct
  source 1..21: mol_type = other RNA
cagcattaaacatttcaaaag

SEQ ID NO: 2575 - RNA, 22 nt, synthetic construct
  source 1..22: mol_type = other RNA
tcagcattaaacatttcaaaag

SEQ ID NO: 2576-2580 - skipped (5 entries)

SEQ ID NO: 2581 - RNA, 10 nt, synthetic construct
  source 1..10: mol_type = other RNA
ttgaaatgtt

SEQ ID NO: 2582 - RNA, 11 nt, synthetic construct
  source 1..11: mol_type = other RNA
ttgaaatgttt

SEQ ID NO: 2583 - RNA, 12 nt, synthetic construct
  source 1..12: mol_type = other RNA
ttgaaatgttta

SEQ ID NO: 2584 - RNA, 13 nt, synthetic construct
  source 1..13: mol_type = other RNA
ttgaaatgtttaa

SEQ ID NO: 2585 - RNA, 14 nt, synthetic construct
  source 1..14: mol_type = other RNA
ttgaaatgtttaat

SEQ ID NO: 2586 - RNA, 15 nt, synthetic construct
  source 1..15: mol_type = other RNA
ttgaaatgtttaatg

SEQ ID NO: 2587 - RNA, 16 nt, synthetic construct
  source 1..16: mol_type = other RNA
ttgaaatgtttaatgc

SEQ ID NO: 2588 - RNA, 17 nt, synthetic construct
  source 1..17: mol_type = other RNA
ttgaaatgtttaatgct

SEQ ID NO: 2589 - RNA, 18 nt, synthetic construct
  source 1..18: mol_type = other RNA
ttgaaatgtttaatgctg

SEQ ID NO: 2590 - RNA, 19 nt, synthetic construct
  source 1..19: mol_type = other RNA
ttgaaatgtttaatgctga

SEQ ID NO: 2591 - RNA, 21 nt, synthetic construct
  source 1..21: mol_type = other RNA
agtatttaaaatttatcactt

SEQ ID NO: 2592 - RNA, 22 nt, synthetic construct
  source 1..22: mol_type = other RNA
gagtatttaaaatttatcactt

SEQ ID NO: 2593 - RNA, 23 nt, synthetic construct
  source 1..23: mol_type = other RNA
tgagtatttaaaatttatcactt

SEQ ID NO: 2594 - RNA, 24 nt, synthetic construct
  source 1..24: mol_type = other RNA
gtgagtatttaaaatttatcactt

SEQ ID NO: 2595 - RNA, 25 nt, synthetic construct
  source 1..25: mol_type = other RNA
tgtgagtatttaaaatttatcactt

SEQ ID NO: 2596 - RNA, 26 nt, synthetic construct
  source 1..26: mol_type = other RNA
atgtgagtatttaaaatttatcactt

SEQ ID NO: 2597 - RNA, 27 nt, synthetic construct
  source 1..27: mol_type = other RNA
aatgtgagtatttaaaatttatcactt

SEQ ID NO: 2598 - RNA, 28 nt, synthetic construct
  source 1..28: mol_type = other RNA
aaatgtgagtatttaaaatttatcactt

SEQ ID NO: 2599 - RNA, 29 nt, synthetic construct
  source 1..29: mol_type = other RNA
aaaatgtgagtatttaaaatttatcactt

SEQ ID NO: 2600 - RNA, 30 nt, synthetic construct
  source 1..30: mol_type = other RNA
aaaaatgtgagtatttaaaatttatcactt

SEQ ID NO: 2601 - RNA, 31 nt, synthetic construct
  source 1..31: mol_type = other RNA
taaaaatgtgagtatttaaaatttatcactt

SEQ ID NO: 2602 - RNA, 32 nt, synthetic construct
  source 1..32: mol_type = other RNA
ttaaaaatgtgagtatttaaaatttatcactt

SEQ ID NO: 2603 - RNA, 33 nt, synthetic construct
  source 1..33: mol_type = other RNA
cttaaaaatgtgagtatttaaaatttatcactt

SEQ ID NO: 2604 - RNA, 34 nt, synthetic construct
  source 1..34: mol_type = other RNA
gcttaaaaatgtgagtatttaaaatttatcactt

SEQ ID NO: 2605 - RNA, 35 nt, synthetic construct
  source 1..35: mol_type = other RNA
tgcttaaaaatgtgagtatttaaaatttatcactt

SEQ ID NO: 2606 - RNA, 36 nt, synthetic construct
  source 1..36: mol_type = other RNA
ttgcttaaaaatgtgagtatttaaaatttatcactt

SEQ ID NO: 2607 - RNA, 37 nt, synthetic construct
  source 1..37: mol_type = other RNA
tttgcttaaaaatgtgagtatttaaaatttatcactt

SEQ ID NO: 2608 - RNA, 38 nt, synthetic construct
  source 1..38: mol_type = other RNA
gtttgcttaaaaatgtgagtatttaaaatttatcactt

SEQ ID NO: 2609 - RNA, 39 nt, synthetic construct
  source 1..39: mol_type = other RNA
ggtttgcttaaaaatgtgagtatttaaaatttatcactt

SEQ ID NO: 2610 - RNA, 40 nt, synthetic construct
  source 1..40: mol_type = other RNA
tggtttgcttaaaaatgtgagtatttaaaatttatcactt

SEQ ID NO: 2611 - RNA, 20 nt, synthetic construct
  source 1..20: mol_type = other RNA
aagttgctcttttcactcaa

SEQ ID NO: 2612 - RNA, 20 nt, synthetic construct
  source 1..20: mol_type = other RNA
atactttcagcactcagatt

SEQ ID NO: 2613 - RNA, 20 nt, synthetic construct
  source 1..20: mol_type = other RNA
cacctatagattactatcct

SEQ ID NO: 2614 - RNA, 20 nt, synthetic construct
  source 1..20: mol_type = other RNA
ctcagatttgataaagaagt

SEQ ID NO: 2615 - RNA, 20 nt, synthetic construct
  source 1..20: mol_type = other RNA
ctcatatactttcagcactc

SEQ ID NO: 2616 - RNA, 20 nt, synthetic construct
  source 1..20: mol_type = other RNA
ctcttttcactcaaggtctt

SEQ ID NO: 2617 - RNA, 20 nt, synthetic construct
  source 1..20: mol_type = other RNA
ctggtttgcttaaaaatgtg

SEQ ID NO: 2618 - RNA, 20 nt, synthetic construct
  source 1..20: mol_type = other RNA
gaagttgctcttttcactca

SEQ ID NO: 2619 - RNA, 20 nt, synthetic construct
  source 1..20: mol_type = other RNA
gcacctatagattactatcc

SEQ ID NO: 2620 - RNA, 20 nt, synthetic construct
  source 1..20: mol_type = other RNA
gcactcagatttgataaaga

SEQ ID NO: 2621 - RNA, 20 nt, synthetic construct
  source 1..20: mol_type = other RNA
gctcttttcactcaaggtct

SEQ ID NO: 2622 - RNA, 20 nt, synthetic construct
  source 1..20: mol_type = other RNA
ggtcttgggtatgcacctat

SEQ ID NO: 2623 - RNA, 20 nt, synthetic construct
  source 1..20: mol_type = other RNA
gtattatctcatatactttc

SEQ ID NO: 2624 - RNA, 20 nt, synthetic construct
  source 1..20: mol_type = other RNA
tatagattactatcctggtt

SEQ ID NO: 2625 - RNA, 20 nt, synthetic construct
  source 1..20: mol_type = other RNA
tatcctggtttgcttaaaaa

SEQ ID NO: 2626 - RNA, 20 nt, synthetic construct
  source 1..20: mol_type = other RNA
tatttaaaatttatcacttt

SEQ ID NO: 2627 - RNA, 20 nt, synthetic construct
  source 1..20: mol_type = other RNA
tcagcactcagatttgataa

SEQ ID NO: 2628 - RNA, 20 nt, synthetic construct
  source 1..20: mol_type = other RNA
tcctggtttgcttaaaaatg

SEQ ID NO: 2629 - RNA, 20 nt, synthetic construct
  source 1..20: mol_type = other RNA
tcttttcactcaaggtcttg

SEQ ID NO: 2630 - RNA, 20 nt, synthetic construct
  source 1..20: mol_type = other RNA
ttcactcaaggtcttgggta

SEQ ID NO: 2631 - RNA, 17 nt, synthetic construct
  source 1..17: mol_type = other RNA
tcttgggtatgcaccta

SEQ ID NO: 2632 - RNA, 18 nt, synthetic construct
  source 1..18: mol_type = other RNA
gtcttgggtatgcaccta

SEQ ID NO: 2633 - RNA, 19 nt, synthetic construct
  source 1..19: mol_type = other RNA
ggtcttgggtatgcaccta

SEQ ID NO: 2634 - RNA, 20 nt, synthetic construct
  source 1..20: mol_type = other RNA
aggtcttgggtatgcaccta

SEQ ID NO: 2635 - RNA, 21 nt, synthetic construct
  source 1..21: mol_type = other RNA
aaggtcttgggtatgcaccta

SEQ ID NO: 2636 - RNA, 22 nt, synthetic construct
  source 1..22: mol_type = other RNA
caaggtcttgggtatgcaccta

SEQ ID NO: 2637-2641 - skipped (5 entries)

SEQ ID NO: 2642 - RNA, 10 nt, synthetic construct
  source 1..10: mol_type = other RNA
gtgcataccc

SEQ ID NO: 2643 - RNA, 11 nt, synthetic construct
  source 1..11: mol_type = other RNA
gtgcataccca

SEQ ID NO: 2644 - RNA, 12 nt, synthetic construct
  source 1..12: mol_type = other RNA
gtgcatacccaa

SEQ ID NO: 2645 - RNA, 13 nt, synthetic construct
  source 1..13: mol_type = other RNA
gtgcatacccaag

SEQ ID NO: 2646 - RNA, 14 nt, synthetic construct
  source 1..14: mol_type = other RNA
gtgcatacccaaga

SEQ ID NO: 2647 - RNA, 15 nt, synthetic construct
  source 1..15: mol_type = other RNA
gtgcatacccaagac

SEQ ID NO: 2648 - RNA, 16 nt, synthetic construct
  source 1..16: mol_type = other RNA
gtgcatacccaagacc

SEQ ID NO: 2649 - RNA, 17 nt, synthetic construct
  source 1..17: mol_type = other RNA
gtgcatacccaagacct

SEQ ID NO: 2650 - RNA, 18 nt, synthetic construct
  source 1..18: mol_type = other RNA
gtgcatacccaagacctt

SEQ ID NO: 2651 - RNA, 19 nt, synthetic construct
  source 1..19: mol_type = other RNA
gtgcatacccaagaccttg

SEQ ID NO: 2652 - RNA, 36 nt, synthetic construct
  source 1..36: mol_type = other RNA
tcacatttttaagcaaaccaggatagtaatcaatag

SEQ ID NO: 2653 - RNA, 36 nt, synthetic construct
  source 1..36: mol_type = other RNA
tcacatttttaagcaaaccaggatagtaatcgatag

SEQ ID NO: 2654 - RNA, 36 nt, synthetic construct
  source 1..36: mol_type = other RNA
tcacatttttaagcaaaccaggatagtaatctatag

SEQ ID NO: 2655 - RNA, 37 nt, synthetic construct
  source 1..37: mol_type = other RNA
ctcacatttttaagcaaaccaggatagtaatcaatag

SEQ ID NO: 2656 - RNA, 37 nt, synthetic construct
  source 1..37: mol_type = other RNA
ctcacatttttaagcaaaccaggatagtaatcgatag

SEQ ID NO: 2657 - RNA, 37 nt, synthetic construct
  source 1..37: mol_type = other RNA
ctcacatttttaagcaaaccaggatagtaatctatag

SEQ ID NO: 2658 - RNA, 38 nt, synthetic construct
  source 1..38: mol_type = other RNA
actcacatttttaagcaaaccaggatagtaatcaatag

SEQ ID NO: 2659 - RNA, 38 nt, synthetic construct
  source 1..38: mol_type = other RNA
actcacatttttaagcaaaccaggatagtaatcgatag

SEQ ID NO: 2660 - RNA, 38 nt, synthetic construct
  source 1..38: mol_type = other RNA
actcacatttttaagcaaaccaggatagtaatctatag

SEQ ID NO: 2661 - RNA, 39 nt, synthetic construct
  source 1..39: mol_type = other RNA
tactcacatttttaagcaaaccaggatagtaatcaatag

SEQ ID NO: 2662 - RNA, 39 nt, synthetic construct
  source 1..39: mol_type = other RNA
tactcacatttttaagcaaaccaggatagtaatcgatag

SEQ ID NO: 2663 - RNA, 39 nt, synthetic construct
  source 1..39: mol_type = other RNA
tactcacatttttaagcaaaccaggatagtaatctatag

SEQ ID NO: 2664 - RNA, 40 nt, synthetic construct
  source 1..40: mol_type = other RNA
atactcacatttttaagcaaaccaggatagtaatcaatag

SEQ ID NO: 2665 - RNA, 40 nt, synthetic construct
  source 1..40: mol_type = other RNA
atactcacatttttaagcaaaccaggatagtaatcgatag

SEQ ID NO: 2666 - RNA, 40 nt, synthetic construct
  source 1..40: mol_type = other RNA
atactcacatttttaagcaaaccaggatagtaatctatag

SEQ ID NO: 2667 - RNA, 20 nt, synthetic construct
  source 1..20: mol_type = other RNA
caaaccaggatagtaatcaa

SEQ ID NO: 2668 - RNA, 20 nt, synthetic construct
  source 1..20: mol_type = other RNA
caaaccaggatagtaatcga

SEQ ID NO: 2669 - RNA, 20 nt, synthetic construct
  source 1..20: mol_type = other RNA
caaaccaggatagtaatcta

SEQ ID NO: 2670 - RNA, 20 nt, synthetic construct
  source 1..20: mol_type = other RNA
catttttaagcaaaccagga

SEQ ID NO: 2671 - RNA, 20 nt, synthetic construct
  source 1..20: mol_type = other RNA
ctttttgctgatggcacatt

SEQ ID NO: 2672 - RNA, 20 nt, synthetic construct
  source 1..20: mol_type = other RNA
ttcagcattaaacatttcaa

SEQ ID NO: 2673 - RNA, 20 nt, synthetic construct
  source 1..20: mol_type = other RNA
ttttaaatactcacattttt

SEQ ID NO: 2674 - RNA, 17 nt, synthetic construct
  source 1..17: mol_type = other RNA
cacctatagattactat

SEQ ID NO: 2675 - RNA, 18 nt, synthetic construct
  source 1..18: mol_type = other RNA
gcacctatagattactat

SEQ ID NO: 2676 - RNA, 19 nt, synthetic construct
  source 1..19: mol_type = other RNA
tgcacctatagattactat

SEQ ID NO: 2677 - RNA, 20 nt, synthetic construct
  source 1..20: mol_type = other RNA
atgcacctatagattactat

SEQ ID NO: 2678 - RNA, 21 nt, synthetic construct
  source 1..21: mol_type = other RNA
tatgcacctatagattactat

SEQ ID NO: 2679 - RNA, 22 nt, synthetic construct
  source 1..22: mol_type = other RNA
gtatgcacctatagattactat

SEQ ID NO: 2680-2684 - skipped (5 entries)

SEQ ID NO: 2685 - RNA, 10 nt, synthetic construct
  source 1..10: mol_type = other RNA
gtaatctata

SEQ ID NO: 2686 - RNA, 11 nt, synthetic construct
  source 1..11: mol_type = other RNA
gtaatctatag

SEQ ID NO: 2687 - RNA, 12 nt, synthetic construct
  source 1..12: mol_type = other RNA
gtaatctatagg

SEQ ID NO: 2688 - RNA, 13 nt, synthetic construct
  source 1..13: mol_type = other RNA
gtaatctataggt

SEQ ID NO: 2689 - RNA, 14 nt, synthetic construct
  source 1..14: mol_type = other RNA
gtaatctataggtg

SEQ ID NO: 2690 - RNA, 15 nt, synthetic construct
  source 1..15: mol_type = other RNA
gtaatctataggtgc

SEQ ID NO: 2691 - RNA, 16 nt, synthetic construct
  source 1..16: mol_type = other RNA
gtaatctataggtgca

SEQ ID NO: 2692 - RNA, 17 nt, synthetic construct
  source 1..17: mol_type = other RNA
gtaatctataggtgcat

SEQ ID NO: 2693 - RNA, 18 nt, synthetic construct
  source 1..18: mol_type = other RNA
gtaatctataggtgcata

SEQ ID NO: 2694 - RNA, 19 nt, synthetic construct
  source 1..19: mol_type = other RNA
gtaatctataggtgcatac

SEQ ID NO: 2695 - RNA, 25 nt, synthetic construct
  source 1..25: mol_type = other RNA
tcacatttttaagcaaaccaggata

SEQ ID NO: 2696 - RNA, 25 nt, synthetic construct
  source 1..25: mol_type = other RNA
tcacatttttaagcaacccaggata

SEQ ID NO: 2697 - RNA, 25 nt, synthetic construct
  source 1..25: mol_type = other RNA
tcacatttttaagcaagccaggata

SEQ ID NO: 2698 - RNA, 25 nt, synthetic construct
  source 1..25: mol_type = other RNA
tcacatttttaagcaatccaggata

SEQ ID NO: 2699 - RNA, 26 nt, synthetic construct
  source 1..26: mol_type = other RNA
ctcacatttttaagcaaaccaggata

SEQ ID NO: 2700 - RNA, 26 nt, synthetic construct
  source 1..26: mol_type = other RNA
ctcacatttttaagcaacccaggata

SEQ ID NO: 2701 - RNA, 26 nt, synthetic construct
  source 1..26: mol_type = other RNA
ctcacatttttaagcaagccaggata

SEQ ID NO: 2702 - RNA, 26 nt, synthetic construct
  source 1..26: mol_type = other RNA
ctcacatttttaagcaatccaggata

SEQ ID NO: 2703 - RNA, 27 nt, synthetic construct
  source 1..27: mol_type = other RNA
actcacatttttaagcaaaccaggata

SEQ ID NO: 2704 - RNA, 27 nt, synthetic construct
  source 1..27: mol_type = other RNA
actcacatttttaagcaacccaggata

SEQ ID NO: 2705 - RNA, 27 nt, synthetic construct
  source 1..27: mol_type = other RNA
actcacatttttaagcaagccaggata

SEQ ID NO: 2706 - RNA, 27 nt, synthetic construct
  source 1..27: mol_type = other RNA
actcacatttttaagcaatccaggata

SEQ ID NO: 2707 - RNA, 28 nt, synthetic construct
  source 1..28: mol_type = other RNA
tactcacatttttaagcaaaccaggata

SEQ ID NO: 2708 - RNA, 28 nt, synthetic construct
  source 1..28: mol_type = other RNA
tactcacatttttaagcaacccaggata

SEQ ID NO: 2709 - RNA, 28 nt, synthetic construct
  source 1..28: mol_type = other RNA
tactcacatttttaagcaagccaggata

SEQ ID NO: 2710 - RNA, 28 nt, synthetic construct
  source 1..28: mol_type = other RNA
tactcacatttttaagcaatccaggata

SEQ ID NO: 2711 - RNA, 29 nt, synthetic construct
  source 1..29: mol_type = other RNA
atactcacatttttaagcaaaccaggata

SEQ ID NO: 2712 - RNA, 29 nt, synthetic construct
  source 1..29: mol_type = other RNA
atactcacatttttaagcaacccaggata

SEQ ID NO: 2713 - RNA, 29 nt, synthetic construct
  source 1..29: mol_type = other RNA
atactcacatttttaagcaagccaggata

SEQ ID NO: 2714 - RNA, 29 nt, synthetic construct
  source 1..29: mol_type = other RNA
atactcacatttttaagcaatccaggata

SEQ ID NO: 2715 - RNA, 30 nt, synthetic construct
  source 1..30: mol_type = other RNA
aatactcacatttttaagcaaaccaggata

SEQ ID NO: 2716 - RNA, 30 nt, synthetic construct
  source 1..30: mol_type = other RNA
aatactcacatttttaagcaacccaggata

SEQ ID NO: 2717 - RNA, 30 nt, synthetic construct
  source 1..30: mol_type = other RNA
aatactcacatttttaagcaagccaggata

SEQ ID NO: 2718 - RNA, 30 nt, synthetic construct
  source 1..30: mol_type = other RNA
aatactcacatttttaagcaatccaggata

SEQ ID NO: 2719 - RNA, 31 nt, synthetic construct
  source 1..31: mol_type = other RNA
aaatactcacatttttaagcaaaccaggata

SEQ ID NO: 2720 - RNA, 31 nt, synthetic construct
  source 1..31: mol_type = other RNA
aaatactcacatttttaagcaacccaggata

SEQ ID NO: 2721 - RNA, 31 nt, synthetic construct
  source 1..31: mol_type = other RNA
aaatactcacatttttaagcaagccaggata

SEQ ID NO: 2722 - RNA, 31 nt, synthetic construct
  source 1..31: mol_type = other RNA
aaatactcacatttttaagcaatccaggata

SEQ ID NO: 2723 - RNA, 32 nt, synthetic construct
  source 1..32: mol_type = other RNA
taaatactcacatttttaagcaaaccaggata

SEQ ID NO: 2724 - RNA, 32 nt, synthetic construct
  source 1..32: mol_type = other RNA
taaatactcacatttttaagcaacccaggata

SEQ ID NO: 2725 - RNA, 32 nt, synthetic construct
  source 1..32: mol_type = other RNA
taaatactcacatttttaagcaagccaggata

SEQ ID NO: 2726 - RNA, 32 nt, synthetic construct
  source 1..32: mol_type = other RNA
taaatactcacatttttaagcaatccaggata

SEQ ID NO: 2727 - RNA, 33 nt, synthetic construct
  source 1..33: mol_type = other RNA
ttaaatactcacatttttaagcaaaccaggata

SEQ ID NO: 2728 - RNA, 33 nt, synthetic construct
  source 1..33: mol_type = other RNA
ttaaatactcacatttttaagcaacccaggata

SEQ ID NO: 2729 - RNA, 33 nt, synthetic construct
  source 1..33: mol_type = other RNA
ttaaatactcacatttttaagcaagccaggata

SEQ ID NO: 2730 - RNA, 33 nt, synthetic construct
  source 1..33: mol_type = other RNA
ttaaatactcacatttttaagcaatccaggata

SEQ ID NO: 2731 - RNA, 34 nt, synthetic construct
  source 1..34: mol_type = other RNA
tttaaatactcacatttttaagcaaaccaggata

SEQ ID NO: 2732 - RNA, 34 nt, synthetic construct
  source 1..34: mol_type = other RNA
tttaaatactcacatttttaagcaacccaggata

SEQ ID NO: 2733 - RNA, 34 nt, synthetic construct
  source 1..34: mol_type = other RNA
tttaaatactcacatttttaagcaagccaggata

SEQ ID NO: 2734 - RNA, 34 nt, synthetic construct
  source 1..34: mol_type = other RNA
tttaaatactcacatttttaagcaatccaggata

SEQ ID NO: 2735 - RNA, 35 nt, synthetic construct
  source 1..35: mol_type = other RNA
ttttaaatactcacatttttaagcaaaccaggata

SEQ ID NO: 2736 - RNA, 35 nt, synthetic construct
  source 1..35: mol_type = other RNA
ttttaaatactcacatttttaagcaacccaggata

SEQ ID NO: 2737 - RNA, 35 nt, synthetic construct
  source 1..35: mol_type = other RNA
ttttaaatactcacatttttaagcaagccaggata

SEQ ID NO: 2738 - RNA, 35 nt, synthetic construct
  source 1..35: mol_type = other RNA
ttttaaatactcacatttttaagcaatccaggata

SEQ ID NO: 2739 - RNA, 36 nt, synthetic construct
  source 1..36: mol_type = other RNA
attttaaatactcacatttttaagcaaaccaggata

SEQ ID NO: 2740 - RNA, 36 nt, synthetic construct
  source 1..36: mol_type = other RNA
attttaaatactcacatttttaagcaacccaggata

SEQ ID NO: 2741 - RNA, 36 nt, synthetic construct
  source 1..36: mol_type = other RNA
attttaaatactcacatttttaagcaagccaggata

SEQ ID NO: 2742 - RNA, 36 nt, synthetic construct
  source 1..36: mol_type = other RNA
attttaaatactcacatttttaagcaatccaggata

SEQ ID NO: 2743 - RNA, 37 nt, synthetic construct
  source 1..37: mol_type = other RNA
aattttaaatactcacatttttaagcaaaccaggata

SEQ ID NO: 2744 - RNA, 37 nt, synthetic construct
  source 1..37: mol_type = other RNA
aattttaaatactcacatttttaagcaacccaggata

SEQ ID NO: 2745 - RNA, 37 nt, synthetic construct
  source 1..37: mol_type = other RNA
aattttaaatactcacatttttaagcaagccaggata

SEQ ID NO: 2746 - RNA, 37 nt, synthetic construct
  source 1..37: mol_type = other RNA
aattttaaatactcacatttttaagcaatccaggata

SEQ ID NO: 2747 - RNA, 38 nt, synthetic construct
  source 1..38: mol_type = other RNA
aaattttaaatactcacatttttaagcaaaccaggata

SEQ ID NO: 2748 - RNA, 38 nt, synthetic construct
  source 1..38: mol_type = other RNA
aaattttaaatactcacatttttaagcaacccaggata

SEQ ID NO: 2749 - RNA, 38 nt, synthetic construct
  source 1..38: mol_type = other RNA
aaattttaaatactcacatttttaagcaagccaggata

SEQ ID NO: 2750 - RNA, 38 nt, synthetic construct
  source 1..38: mol_type = other RNA
aaattttaaatactcacatttttaagcaatccaggata

SEQ ID NO: 2751 - RNA, 39 nt, synthetic construct
  source 1..39: mol_type = other RNA
taaattttaaatactcacatttttaagcaaaccaggata

SEQ ID NO: 2752 - RNA, 39 nt, synthetic construct
  source 1..39: mol_type = other RNA
taaattttaaatactcacatttttaagcaacccaggata

SEQ ID NO: 2753 - RNA, 39 nt, synthetic construct
  source 1..39: mol_type = other RNA
taaattttaaatactcacatttttaagcaagccaggata

SEQ ID NO: 2754 - RNA, 39 nt, synthetic construct
  source 1..39: mol_type = other RNA
taaattttaaatactcacatttttaagcaatccaggata

SEQ ID NO: 2755 - RNA, 40 nt, synthetic construct
  source 1..40: mol_type = other RNA
ataaattttaaatactcacatttttaagcaaaccaggata

SEQ ID NO: 2756 - RNA, 40 nt, synthetic construct
  source 1..40: mol_type = other RNA
ataaattttaaatactcacatttttaagcaacccaggata

SEQ ID NO: 2757 - RNA, 40 nt, synthetic construct
  source 1..40: mol_type = other RNA
ataaattttaaatactcacatttttaagcaagccaggata

SEQ ID NO: 2758 - RNA, 40 nt, synthetic construct
  source 1..40: mol_type = other RNA
ataaattttaaatactcacatttttaagcaatccaggata

SEQ ID NO: 2759 - RNA, 20 nt, synthetic construct
  source 1..20: mol_type = other RNA
actcacatttttaagcaacc

SEQ ID NO: 2760 - RNA, 20 nt, synthetic construct
  source 1..20: mol_type = other RNA
actcacatttttaagcaagc

SEQ ID NO: 2761 - RNA, 20 nt, synthetic construct
  source 1..20: mol_type = other RNA
actcacatttttaagcaatc

SEQ ID NO: 2762 - RNA, 20 nt, synthetic construct
  source 1..20: mol_type = other RNA
atttttaagcaacccaggat

SEQ ID NO: 2763 - RNA, 20 nt, synthetic construct
  source 1..20: mol_type = other RNA
atttttaagcaagccaggat

SEQ ID NO: 2764 - RNA, 20 nt, synthetic construct
  source 1..20: mol_type = other RNA
atttttaagcaatccaggat

SEQ ID NO: 2765 - RNA, 20 nt, synthetic construct
  source 1..20: mol_type = other RNA
cacatttttaagcaacccag

SEQ ID NO: 2766 - RNA, 20 nt, synthetic construct
  source 1..20: mol_type = other RNA
cacatttttaagcaagccag

SEQ ID NO: 2767 - RNA, 20 nt, synthetic construct
  source 1..20: mol_type = other RNA
cacatttttaagcaatccag

SEQ ID NO: 2768 - RNA, 17 nt, synthetic construct
  source 1..17: mol_type = other RNA
actatcctggtttgctt

SEQ ID NO: 2769 - RNA, 18 nt, synthetic construct
  source 1..18: mol_type = other RNA
tactatcctggtttgctt

SEQ ID NO: 2770 - RNA, 19 nt, synthetic construct
  source 1..19: mol_type = other RNA
ttactatcctggtttgctt

SEQ ID NO: 2771 - RNA, 20 nt, synthetic construct
  source 1..20: mol_type = other RNA
attactatcctggtttgctt

SEQ ID NO: 2772 - RNA, 21 nt, synthetic construct
  source 1..21: mol_type = other RNA
gattactatcctggtttgctt

SEQ ID NO: 2773 - RNA, 22 nt, synthetic construct
  source 1..22: mol_type = other RNA
agattactatcctggtttgctt

SEQ ID NO: 2774-2778 - skipped (5 entries)

SEQ ID NO: 2779 - RNA, 10 nt, synthetic construct
  source 1..10: mol_type = other RNA
caaaccagga

SEQ ID NO: 2780 - RNA, 11 nt, synthetic construct
  source 1..11: mol_type = other RNA
caaaccaggat

SEQ ID NO: 2781 - RNA, 12 nt, synthetic construct
  source 1..12: mol_type = other RNA
caaaccaggata

SEQ ID NO: 2782 - RNA, 13 nt, synthetic construct
  source 1..13: mol_type = other RNA
caaaccaggatag

SEQ ID NO: 2783 - RNA, 14 nt, synthetic construct
  source 1..14: mol_type = other RNA
caaaccaggatagt

SEQ ID NO: 2784 - RNA, 15 nt, synthetic construct
  source 1..15: mol_type = other RNA
caaaccaggatagta

SEQ ID NO: 2785 - RNA, 16 nt, synthetic construct
  source 1..16: mol_type = other RNA
caaaccaggatagtaa

SEQ ID NO: 2786 - RNA, 17 nt, synthetic construct
  source 1..17: mol_type = other RNA
caaaccaggatagtaat

SEQ ID NO: 2787 - RNA, 18 nt, synthetic construct
  source 1..18: mol_type = other RNA
caaaccaggatagtaatc

SEQ ID NO: 2788 - RNA, 19 nt, synthetic construct
  source 1..19: mol_type = other RNA
caaaccaggatagtaatct

SEQ ID NO: 2789 - RNA, 13 nt, synthetic construct
  source 1..13: mol_type = other RNA
tcacatttttaag

SEQ ID NO: 2790 - RNA, 13 nt, synthetic construct
  source 1..13: mol_type = other RNA
tcacgtttttaag

SEQ ID NO: 2791 - RNA, 14 nt, synthetic construct
  source 1..14: mol_type = other RNA
ctcacatttttaag

SEQ ID NO: 2792 - RNA, 14 nt, synthetic construct
  source 1..14: mol_type = other RNA
ctcacgtttttaag

SEQ ID NO: 2793 - RNA, 15 nt, synthetic construct
  source 1..15: mol_type = other RNA
actcacatttttaag

SEQ ID NO: 2794 - RNA, 15 nt, synthetic construct
  source 1..15: mol_type = other RNA
actcacgtttttaag

SEQ ID NO: 2795 - RNA, 16 nt, synthetic construct
  source 1..16: mol_type = other RNA
tactcacatttttaag

SEQ ID NO: 2796 - RNA, 16 nt, synthetic construct
  source 1..16: mol_type = other RNA
tactcacgtttttaag

SEQ ID NO: 2797 - RNA, 17 nt, synthetic construct
  source 1..17: mol_type = other RNA
atactcacatttttaag

SEQ ID NO: 2798 - RNA, 17 nt, synthetic construct
  source 1..17: mol_type = other RNA
atactcacgtttttaag

SEQ ID NO: 2799 - RNA, 18 nt, synthetic construct
  source 1..18: mol_type = other RNA
aatactcacatttttaag

SEQ ID NO: 2800 - RNA, 18 nt, synthetic construct
  source 1..18: mol_type = other RNA
aatactcacgtttttaag

SEQ ID NO: 2801 - RNA, 19 nt, synthetic construct
  source 1..19: mol_type = other RNA
aaatactcacatttttaag

SEQ ID NO: 2802 - RNA, 19 nt, synthetic construct
  source 1..19: mol_type = other RNA
aaatactcacgtttttaag

SEQ ID NO: 2803 - RNA, 20 nt, synthetic construct
  source 1..20: mol_type = other RNA
taaatactcacatttttaag

SEQ ID NO: 2804 - RNA, 20 nt, synthetic construct
  source 1..20: mol_type = other RNA
taaatactcacgtttttaag

SEQ ID NO: 2805 - RNA, 21 nt, synthetic construct
  source 1..21: mol_type = other RNA
ttaaatactcacatttttaag

SEQ ID NO: 2806 - RNA, 21 nt, synthetic construct
  source 1..21: mol_type = other RNA
ttaaatactcacgtttttaag

SEQ ID NO: 2807 - RNA, 22 nt, synthetic construct
  source 1..22: mol_type = other RNA
tttaaatactcacatttttaag

SEQ ID NO: 2808 - RNA, 22 nt, synthetic construct
  source 1..22: mol_type = other RNA
tttaaatactcacgtttttaag

SEQ ID NO: 2809 - RNA, 23 nt, synthetic construct
  source 1..23: mol_type = other RNA
ttttaaatactcacatttttaag

SEQ ID NO: 2810 - RNA, 23 nt, synthetic construct
  source 1..23: mol_type = other RNA
ttttaaatactcacgtttttaag

SEQ ID NO: 2811 - RNA, 24 nt, synthetic construct
  source 1..24: mol_type = other RNA
attttaaatactcacatttttaag

SEQ ID NO: 2812 - RNA, 24 nt, synthetic construct
  source 1..24: mol_type = other RNA
attttaaatactcacgtttttaag

SEQ ID NO: 2813 - RNA, 25 nt, synthetic construct
  source 1..25: mol_type = other RNA
aattttaaatactcacatttttaag

SEQ ID NO: 2814 - RNA, 25 nt, synthetic construct
  source 1..25: mol_type = other RNA
aattttaaatactcacgtttttaag

SEQ ID NO: 2815 - RNA, 26 nt, synthetic construct
  source 1..26: mol_type = other RNA
aaattttaaatactcacatttttaag

SEQ ID NO: 2816 - RNA, 26 nt, synthetic construct
  source 1..26: mol_type = other RNA
aaattttaaatactcacgtttttaag

SEQ ID NO: 2817 - RNA, 27 nt, synthetic construct
  source 1..27: mol_type = other RNA
taaattttaaatactcacatttttaag

SEQ ID NO: 2818 - RNA, 27 nt, synthetic construct
  source 1..27: mol_type = other RNA
taaattttaaatactcacgtttttaag

SEQ ID NO: 2819 - RNA, 28 nt, synthetic construct
  source 1..28: mol_type = other RNA
ataaattttaaatactcacatttttaag

SEQ ID NO: 2820 - RNA, 28 nt, synthetic construct
  source 1..28: mol_type = other RNA
ataaattttaaatactcacgtttttaag

SEQ ID NO: 2821 - RNA, 29 nt, synthetic construct
  source 1..29: mol_type = other RNA
gataaattttaaatactcacatttttaag

SEQ ID NO: 2822 - RNA, 29 nt, synthetic construct
  source 1..29: mol_type = other RNA
gataaattttaaatactcacgtttttaag

SEQ ID NO: 2823 - RNA, 30 nt, synthetic construct
  source 1..30: mol_type = other RNA
tgataaattttaaatactcacatttttaag

SEQ ID NO: 2824 - RNA, 30 nt, synthetic construct
  source 1..30: mol_type = other RNA
tgataaattttaaatactcacgtttttaag

SEQ ID NO: 2825 - RNA, 31 nt, synthetic construct
  source 1..31: mol_type = other RNA
gtgataaattttaaatactcacatttttaag

SEQ ID NO: 2826 - RNA, 31 nt, synthetic construct
  source 1..31: mol_type = other RNA
gtgataaattttaaatactcacgtttttaag

SEQ ID NO: 2827 - RNA, 32 nt, synthetic construct
  source 1..32: mol_type = other RNA
agtgataaattttaaatactcacatttttaag

SEQ ID NO: 2828 - RNA, 32 nt, synthetic construct
  source 1..32: mol_type = other RNA
agtgataaattttaaatactcacgtttttaag

SEQ ID NO: 2829 - RNA, 33 nt, synthetic construct
  source 1..33: mol_type = other RNA
aagtgataaattttaaatactcacatttttaag

SEQ ID NO: 2830 - RNA, 33 nt, synthetic construct
  source 1..33: mol_type = other RNA
aagtgataaattttaaatactcacgtttttaag

SEQ ID NO: 2831 - RNA, 34 nt, synthetic construct
  source 1..34: mol_type = other RNA
aaagtgataaattttaaatactcacatttttaag

SEQ ID NO: 2832 - RNA, 34 nt, synthetic construct
  source 1..34: mol_type = other RNA
aaagtgataaattttaaatactcacgtttttaag

SEQ ID NO: 2833 - RNA, 35 nt, synthetic construct
  source 1..35: mol_type = other RNA
aaaagtgataaattttaaatactcacatttttaag

SEQ ID NO: 2834 - RNA, 35 nt, synthetic construct
  source 1..35: mol_type = other RNA
aaaagtgataaattttaaatactcacgtttttaag

SEQ ID NO: 2835 - RNA, 36 nt, synthetic construct
  source 1..36: mol_type = other RNA
caaaagtgataaattttaaatactcacatttttaag

SEQ ID NO: 2836 - RNA, 36 nt, synthetic construct
  source 1..36: mol_type = other RNA
caaaagtgataaattttaaatactcacgtttttaag

SEQ ID NO: 2837 - RNA, 37 nt, synthetic construct
  source 1..37: mol_type = other RNA
tcaaaagtgataaattttaaatactcacatttttaag

SEQ ID NO: 2838 - RNA, 37 nt, synthetic construct
  source 1..37: mol_type = other RNA
tcaaaagtgataaattttaaatactcacgtttttaag

SEQ ID NO: 2839 - RNA, 38 nt, synthetic construct
  source 1..38: mol_type = other RNA
ttcaaaagtgataaattttaaatactcacatttttaag

SEQ ID NO: 2840 - RNA, 38 nt, synthetic construct
  source 1..38: mol_type = other RNA
ttcaaaagtgataaattttaaatactcacgtttttaag

SEQ ID NO: 2841 - RNA, 39 nt, synthetic construct
  source 1..39: mol_type = other RNA
tttcaaaagtgataaattttaaatactcacatttttaag

SEQ ID NO: 2842 - RNA, 39 nt, synthetic construct
  source 1..39: mol_type = other RNA
tttcaaaagtgataaattttaaatactcacgtttttaag

SEQ ID NO: 2843 - RNA, 40 nt, synthetic construct
  source 1..40: mol_type = other RNA
atttcaaaagtgataaattttaaatactcacatttttaag

SEQ ID NO: 2844 - RNA, 40 nt, synthetic construct
  source 1..40: mol_type = other RNA
atttcaaaagtgataaattttaaatactcacgtttttaag

SEQ ID NO: 2845 - RNA, 20 nt, synthetic construct
  source 1..20: mol_type = other RNA
gtaagaagagataaacaaag

SEQ ID NO: 2846 - RNA, 17 nt, synthetic construct
  source 1..17: mol_type = other RNA
ctatagattactatcct

SEQ ID NO: 2847 - RNA, 18 nt, synthetic construct
  source 1..18: mol_type = other RNA
cctatagattactatcct

SEQ ID NO: 2848 - RNA, 19 nt, synthetic construct
  source 1..19: mol_type = other RNA
acctatagattactatcct

SEQ ID NO: 2849 - RNA, 21 nt, synthetic construct
  source 1..21: mol_type = other RNA
gcacctatagattactatcct

SEQ ID NO: 2850 - RNA, 22 nt, synthetic construct
  source 1..22: mol_type = other RNA
tgcacctatagattactatcct

SEQ ID NO: 2851-2855 - skipped (5 entries)

SEQ ID NO: 2856 - RNA, 10 nt, synthetic construct
  source 1..10: mol_type = other RNA
atagtaatct

SEQ ID NO: 2857 - RNA, 11 nt, synthetic construct
  source 1..11: mol_type = other RNA
atagtaatcta

SEQ ID NO: 2858 - RNA, 12 nt, synthetic construct
  source 1..12: mol_type = other RNA
atagtaatctat

SEQ ID NO: 2859 - RNA, 13 nt, synthetic construct
  source 1..13: mol_type = other RNA
atagtaatctata

SEQ ID NO: 2860 - RNA, 14 nt, synthetic construct
  source 1..14: mol_type = other RNA
atagtaatctatag

SEQ ID NO: 2861 - RNA, 15 nt, synthetic construct
  source 1..15: mol_type = other RNA
atagtaatctatagg

SEQ ID NO: 2862 - RNA, 16 nt, synthetic construct
  source 1..16: mol_type = other RNA
atagtaatctataggt

SEQ ID NO: 2863 - RNA, 17 nt, synthetic construct
  source 1..17: mol_type = other RNA
atagtaatctataggtg

SEQ ID NO: 2864 - RNA, 18 nt, synthetic construct
  source 1..18: mol_type = other RNA
atagtaatctataggtgc

SEQ ID NO: 2865 - RNA, 19 nt, synthetic construct
  source 1..19: mol_type = other RNA
atagtaatctataggtgca

SEQ ID NO: 2866 - RNA, 22 nt, synthetic construct
  source 1..22: mol_type = other RNA
tcacatttttaagcaaaccagg

SEQ ID NO: 2867 - RNA, 23 nt, synthetic construct
  source 1..23: mol_type = other RNA
ctcacatttttaagcaaaccagg

SEQ ID NO: 2868 - RNA, 24 nt, synthetic construct
  source 1..24: mol_type = other RNA
actcacatttttaagcaaaccagg

SEQ ID NO: 2869 - RNA, 25 nt, synthetic construct
  source 1..25: mol_type = other RNA
tactcacatttttaagcaaaccagg

SEQ ID NO: 2870 - RNA, 26 nt, synthetic construct
  source 1..26: mol_type = other RNA
atactcacatttttaagcaaaccagg

SEQ ID NO: 2871 - RNA, 27 nt, synthetic construct
  source 1..27: mol_type = other RNA
aatactcacatttttaagcaaaccagg

SEQ ID NO: 2872 - RNA, 28 nt, synthetic construct
  source 1..28: mol_type = other RNA
aaatactcacatttttaagcaaaccagg

SEQ ID NO: 2873 - RNA, 29 nt, synthetic construct
  source 1..29: mol_type = other RNA
taaatactcacatttttaagcaaaccagg

SEQ ID NO: 2874 - RNA, 30 nt, synthetic construct
  source 1..30: mol_type = other RNA
ttaaatactcacatttttaagcaaaccagg

SEQ ID NO: 2875 - RNA, 31 nt, synthetic construct
  source 1..31: mol_type = other RNA
tttaaatactcacatttttaagcaaaccagg

SEQ ID NO: 2876 - RNA, 32 nt, synthetic construct
  source 1..32: mol_type = other RNA
ttttaaatactcacatttttaagcaaaccagg

SEQ ID NO: 2877 - RNA, 33 nt, synthetic construct
  source 1..33: mol_type = other RNA
attttaaatactcacatttttaagcaaaccagg

SEQ ID NO: 2878 - RNA, 34 nt, synthetic construct
  source 1..34: mol_type = other RNA
aattttaaatactcacatttttaagcaaaccagg

SEQ ID NO: 2879 - RNA, 35 nt, synthetic construct
  source 1..35: mol_type = other RNA
aaattttaaatactcacatttttaagcaaaccagg

SEQ ID NO: 2880 - RNA, 36 nt, synthetic construct
  source 1..36: mol_type = other RNA
taaattttaaatactcacatttttaagcaaaccagg

SEQ ID NO: 2881 - RNA, 37 nt, synthetic construct
  source 1..37: mol_type = other RNA
ataaattttaaatactcacatttttaagcaaaccagg

SEQ ID NO: 2882 - RNA, 38 nt, synthetic construct
  source 1..38: mol_type = other RNA
gataaattttaaatactcacatttttaagcaaaccagg

SEQ ID NO: 2883 - RNA, 39 nt, synthetic construct
  source 1..39: mol_type = other RNA
tgataaattttaaatactcacatttttaagcaaaccagg

SEQ ID NO: 2884 - RNA, 40 nt, synthetic construct
  source 1..40: mol_type = other RNA
gtgataaattttaaatactcacatttttaagcaaaccagg

SEQ ID NO: 2885 - RNA, 20 nt, synthetic construct
  source 1..20: mol_type = other RNA
aaaagttaaacatctcttct

SEQ ID NO: 2886 - RNA, 20 nt, synthetic construct
  source 1..20: mol_type = other RNA
aagttaaacatctcttctgg

SEQ ID NO: 2887 - RNA, 20 nt, synthetic construct
  source 1..20: mol_type = other RNA
agttaaacatctcttctgga

SEQ ID NO: 2888 - RNA, 20 nt, synthetic construct
  source 1..20: mol_type = other RNA
atatttccatttactctttt

SEQ ID NO: 2889 - RNA, 20 nt, synthetic construct
  source 1..20: mol_type = other RNA
catttactctttttgctgat

SEQ ID NO: 2890 - RNA, 20 nt, synthetic construct
  source 1..20: mol_type = other RNA
ccatttactctttttgctga

SEQ ID NO: 2891 - RNA, 20 nt, synthetic construct
  source 1..20: mol_type = other RNA
ctcacatttttaagcaaacc

SEQ ID NO: 2892 - RNA, 20 nt, synthetic construct
  source 1..20: mol_type = other RNA
gaaaagttaaacatctcttc

SEQ ID NO: 2893 - RNA, 20 nt, synthetic construct
  source 1..20: mol_type = other RNA
tcacatttttaagcaaacca

SEQ ID NO: 2894 - RNA, 20 nt, synthetic construct
  source 1..20: mol_type = other RNA
tttaaatactcacattttta

SEQ ID NO: 2895 - RNA, 20 nt, synthetic construct
  source 1..20: mol_type = other RNA
tttccatttactctttttgc

SEQ ID NO: 2896 - RNA, 20 nt, synthetic construct
  source 1..20: mol_type = other RNA
tttttgctgatggcacattc

SEQ ID NO: 2897 - RNA, 96 nt, synthetic construct
  source 1..96: mol_type = other RNA
aagttaaacatctcttctgggttttagagctagaaatagcaagttaaaataaggctagtccgttatcaacttgaaaaagtggcaccgagtcggtgc

SEQ ID NO: 2898 - RNA, 96 nt, synthetic construct
  source 1..96: mol_type = other RNA
gaaaagttaaacatctcttcgttttagagctagaaatagcaagttaaaataaggctagtccgttatcaacttgaaaaagtggcaccgagtcggtgc

SEQ ID NO: 2899 - RNA, 100 nt, synthetic construct
  source 1..100: mol_type = other RNA
aagttaaacatctcttctgggttttagagctagaaatagcaagttaaaataaggctagtccgttatcaacttgaaaaagtggcaccgagtcggtgctttt

SEQ ID NO: 2900 - RNA, 100 nt, synthetic construct
  source 1..100: mol_type = other RNA
gaaaagttaaacatctcttcgttttagagctagaaatagcaagttaaaataaggctagtccgttatcaacttgaaaaagtggcaccgagtcggtgctttt

SEQ ID NO: 2901 - RNA, 17 nt, synthetic construct
  source 1..17: mol_type = other RNA
taaacatttcaaaagtg

SEQ ID NO: 2902 - RNA, 18 nt, synthetic construct
  source 1..18: mol_type = other RNA
ttaaacatttcaaaagtg

SEQ ID NO: 2903 - RNA, 19 nt, synthetic construct
  source 1..19: mol_type = other RNA
attaaacatttcaaaagtg

SEQ ID NO: 2904 - RNA, 21 nt, synthetic construct
  source 1..21: mol_type = other RNA
gcattaaacatttcaaaagtg

SEQ ID NO: 2905 - RNA, 22 nt, synthetic construct
  source 1..22: mol_type = other RNA
agcattaaacatttcaaaagtg

SEQ ID NO: 2906-2910 - skipped (5 entries)

SEQ ID NO: 2911 - RNA, 10 nt, synthetic construct
  source 1..10: mol_type = other RNA
ttttgaaatg

SEQ ID NO: 2912 - RNA, 11 nt, synthetic construct
  source 1..11: mol_type = other RNA
ttttgaaatgt

SEQ ID NO: 2913 - RNA, 12 nt, synthetic construct
  source 1..12: mol_type = other RNA
ttttgaaatgtt

SEQ ID NO: 2914 - RNA, 13 nt, synthetic construct
  source 1..13: mol_type = other RNA
ttttgaaatgttt

SEQ ID NO: 2915 - RNA, 14 nt, synthetic construct
  source 1..14: mol_type = other RNA
ttttgaaatgttta

SEQ ID NO: 2916 - RNA, 15 nt, synthetic construct
  source 1..15: mol_type = other RNA
ttttgaaatgtttaa

SEQ ID NO: 2917 - RNA, 16 nt, synthetic construct
  source 1..16: mol_type = other RNA
ttttgaaatgtttaat

SEQ ID NO: 2918 - RNA, 17 nt, synthetic construct
  source 1..17: mol_type = other RNA
ttttgaaatgtttaatg

SEQ ID NO: 2919 - RNA, 18 nt, synthetic construct
  source 1..18: mol_type = other RNA
ttttgaaatgtttaatgc

SEQ ID NO: 2920 - RNA, 19 nt, synthetic construct
  source 1..19: mol_type = other RNA
ttttgaaatgtttaatgct

SEQ ID NO: 2921 - RNA, 19 nt, synthetic construct
  source 1..19: mol_type = other RNA
agtatttaaaatttatcac

SEQ ID NO: 2922 - RNA, 20 nt, synthetic construct
  source 1..20: mol_type = other RNA
gagtatttaaaatttatcac

SEQ ID NO: 2923 - RNA, 21 nt, synthetic construct
  source 1..21: mol_type = other RNA
tgagtatttaaaatttatcac

SEQ ID NO: 2924 - RNA, 22 nt, synthetic construct
  source 1..22: mol_type = other RNA
gtgagtatttaaaatttatcac

SEQ ID NO: 2925 - RNA, 23 nt, synthetic construct
  source 1..23: mol_type = other RNA
tgtgagtatttaaaatttatcac

SEQ ID NO: 2926 - RNA, 24 nt, synthetic construct
  source 1..24: mol_type = other RNA
atgtgagtatttaaaatttatcac

SEQ ID NO: 2927 - RNA, 25 nt, synthetic construct
  source 1..25: mol_type = other RNA
aatgtgagtatttaaaatttatcac

SEQ ID NO: 2928 - RNA, 26 nt, synthetic construct
  source 1..26: mol_type = other RNA
aaatgtgagtatttaaaatttatcac

SEQ ID NO: 2929 - RNA, 27 nt, synthetic construct
  source 1..27: mol_type = other RNA
aaaatgtgagtatttaaaatttatcac

SEQ ID NO: 2930 - RNA, 28 nt, synthetic construct
  source 1..28: mol_type = other RNA
aaaaatgtgagtatttaaaatttatcac

SEQ ID NO: 2931 - RNA, 29 nt, synthetic construct
  source 1..29: mol_type = other RNA
taaaaatgtgagtatttaaaatttatcac

SEQ ID NO: 2932 - RNA, 30 nt, synthetic construct
  source 1..30: mol_type = other RNA
ttaaaaatgtgagtatttaaaatttatcac

SEQ ID NO: 2933 - RNA, 31 nt, synthetic construct
  source 1..31: mol_type = other RNA
cttaaaaatgtgagtatttaaaatttatcac

SEQ ID NO: 2934 - RNA, 32 nt, synthetic construct
  source 1..32: mol_type = other RNA
gcttaaaaatgtgagtatttaaaatttatcac

SEQ ID NO: 2935 - RNA, 33 nt, synthetic construct
  source 1..33: mol_type = other RNA
tgcttaaaaatgtgagtatttaaaatttatcac

SEQ ID NO: 2936 - RNA, 34 nt, synthetic construct
  source 1..34: mol_type = other RNA
ttgcttaaaaatgtgagtatttaaaatttatcac

SEQ ID NO: 2937 - RNA, 35 nt, synthetic construct
  source 1..35: mol_type = other RNA
tttgcttaaaaatgtgagtatttaaaatttatcac

SEQ ID NO: 2938 - RNA, 36 nt, synthetic construct
  source 1..36: mol_type = other RNA
gtttgcttaaaaatgtgagtatttaaaatttatcac

SEQ ID NO: 2939 - RNA, 37 nt, synthetic construct
  source 1..37: mol_type = other RNA
ggtttgcttaaaaatgtgagtatttaaaatttatcac

SEQ ID NO: 2940 - RNA, 38 nt, synthetic construct
  source 1..38: mol_type = other RNA
tggtttgcttaaaaatgtgagtatttaaaatttatcac

SEQ ID NO: 2941 - RNA, 39 nt, synthetic construct
  source 1..39: mol_type = other RNA
ctggtttgcttaaaaatgtgagtatttaaaatttatcac

SEQ ID NO: 2942 - RNA, 40 nt, synthetic construct
  source 1..40: mol_type = other RNA
cctggtttgcttaaaaatgtgagtatttaaaatttatcac

SEQ ID NO: 2943 - RNA, 20 nt, synthetic construct
  source 1..20: mol_type = other RNA
aagaagttgctcttttcact

SEQ ID NO: 2944 - RNA, 20 nt, synthetic construct
  source 1..20: mol_type = other RNA
atatactttcagcactcaga

SEQ ID NO: 2945 - RNA, 20 nt, synthetic construct
  source 1..20: mol_type = other RNA
atctcatatactttcagcac

SEQ ID NO: 2946 - RNA, 20 nt, synthetic construct
  source 1..20: mol_type = other RNA
tgctcttttcactcaaggtc

SEQ ID NO: 2947 - RNA, 20 nt, synthetic construct
  source 1..20: mol_type = other RNA
tgcttaaaaatgtgagtatt

SEQ ID NO: 2948 - RNA, 17 nt, synthetic construct
  source 1..17: mol_type = other RNA
tcagcattaaacatttc

SEQ ID NO: 2949 - RNA, 18 nt, synthetic construct
  source 1..18: mol_type = other RNA
ttcagcattaaacatttc

SEQ ID NO: 2950 - RNA, 19 nt, synthetic construct
  source 1..19: mol_type = other RNA
attcagcattaaacatttc

SEQ ID NO: 2951 - RNA, 21 nt, synthetic construct
  source 1..21: mol_type = other RNA
acattcagcattaaacatttc

SEQ ID NO: 2952 - RNA, 22 nt, synthetic construct
  source 1..22: mol_type = other RNA
cacattcagcattaaacatttc

SEQ ID NO: 2953-2957 - skipped (5 entries)

SEQ ID NO: 2958 - RNA, 10 nt, synthetic construct
  source 1..10: mol_type = other RNA
atgtttaatg

SEQ ID NO: 2959 - RNA, 11 nt, synthetic construct
  source 1..11: mol_type = other RNA
atgtttaatgc

SEQ ID NO: 2960 - RNA, 12 nt, synthetic construct
  source 1..12: mol_type = other RNA
atgtttaatgct

SEQ ID NO: 2961 - RNA, 13 nt, synthetic construct
  source 1..13: mol_type = other RNA
atgtttaatgctg

SEQ ID NO: 2962 - RNA, 14 nt, synthetic construct
  source 1..14: mol_type = other RNA
atgtttaatgctga

SEQ ID NO: 2963 - RNA, 15 nt, synthetic construct
  source 1..15: mol_type = other RNA
atgtttaatgctgaa

SEQ ID NO: 2964 - RNA, 16 nt, synthetic construct
  source 1..16: mol_type = other RNA
atgtttaatgctgaat

SEQ ID NO: 2965 - RNA, 17 nt, synthetic construct
  source 1..17: mol_type = other RNA
atgtttaatgctgaatg

SEQ ID NO: 2966 - RNA, 18 nt, synthetic construct
  source 1..18: mol_type = other RNA
atgtttaatgctgaatgt

SEQ ID NO: 2967 - RNA, 19 nt, synthetic construct
  source 1..19: mol_type = other RNA
atgtttaatgctgaatgtg

SEQ ID NO: 2968 - RNA, 26 nt, synthetic construct
  source 1..26: mol_type = other RNA
agtatttaaaatttatcacttttgaa

SEQ ID NO: 2969 - RNA, 27 nt, synthetic construct
  source 1..27: mol_type = other RNA
gagtatttaaaatttatcacttttgaa

SEQ ID NO: 2970 - RNA, 28 nt, synthetic construct
  source 1..28: mol_type = other RNA
tgagtatttaaaatttatcacttttgaa

SEQ ID NO: 2971 - RNA, 29 nt, synthetic construct
  source 1..29: mol_type = other RNA
gtgagtatttaaaatttatcacttttgaa

SEQ ID NO: 2972 - RNA, 30 nt, synthetic construct
  source 1..30: mol_type = other RNA
tgtgagtatttaaaatttatcacttttgaa

SEQ ID NO: 2973 - RNA, 31 nt, synthetic construct
  source 1..31: mol_type = other RNA
atgtgagtatttaaaatttatcacttttgaa

SEQ ID NO: 2974 - RNA, 32 nt, synthetic construct
  source 1..32: mol_type = other RNA
aatgtgagtatttaaaatttatcacttttgaa

SEQ ID NO: 2975 - RNA, 33 nt, synthetic construct
  source 1..33: mol_type = other RNA
aaatgtgagtatttaaaatttatcacttttgaa

SEQ ID NO: 2976 - RNA, 34 nt, synthetic construct
  source 1..34: mol_type = other RNA
aaaatgtgagtatttaaaatttatcacttttgaa

SEQ ID NO: 2977 - RNA, 35 nt, synthetic construct
  source 1..35: mol_type = other RNA
aaaaatgtgagtatttaaaatttatcacttttgaa

SEQ ID NO: 2978 - RNA, 36 nt, synthetic construct
  source 1..36: mol_type = other RNA
taaaaatgtgagtatttaaaatttatcacttttgaa

SEQ ID NO: 2979 - RNA, 37 nt, synthetic construct
  source 1..37: mol_type = other RNA
ttaaaaatgtgagtatttaaaatttatcacttttgaa

SEQ ID NO: 2980 - RNA, 38 nt, synthetic construct
  source 1..38: mol_type = other RNA
cttaaaaatgtgagtatttaaaatttatcacttttgaa

SEQ ID NO: 2981 - RNA, 39 nt, synthetic construct
  source 1..39: mol_type = other RNA
gcttaaaaatgtgagtatttaaaatttatcacttttgaa

SEQ ID NO: 2982 - RNA, 40 nt, synthetic construct
  source 1..40: mol_type = other RNA
tgcttaaaaatgtgagtatttaaaatttatcacttttgaa

SEQ ID NO: 2983 - RNA, 20 nt, synthetic construct
  source 1..20: mol_type = other RNA
aatttatcacttttgaaatg

SEQ ID NO: 2984 - RNA, 17 nt, synthetic construct
  source 1..17: mol_type = other RNA
ttcaaaagtgataaatt

SEQ ID NO: 2985 - RNA, 18 nt, synthetic construct
  source 1..18: mol_type = other RNA
tttcaaaagtgataaatt

SEQ ID NO: 2986 - RNA, 19 nt, synthetic construct
  source 1..19: mol_type = other RNA
atttcaaaagtgataaatt

SEQ ID NO: 2987 - RNA, 21 nt, synthetic construct
  source 1..21: mol_type = other RNA
acatttcaaaagtgataaatt

SEQ ID NO: 2988 - RNA, 22 nt, synthetic construct
  source 1..22: mol_type = other RNA
aacatttcaaaagtgataaatt

SEQ ID NO: 2989-2993 - skipped (5 entries)

SEQ ID NO: 2994 - RNA, 10 nt, synthetic construct
  source 1..10: mol_type = other RNA
ttatcacttt

SEQ ID NO: 2995 - RNA, 11 nt, synthetic construct
  source 1..11: mol_type = other RNA
ttatcactttt

SEQ ID NO: 2996 - RNA, 12 nt, synthetic construct
  source 1..12: mol_type = other RNA
ttatcacttttg

SEQ ID NO: 2997 - RNA, 13 nt, synthetic construct
  source 1..13: mol_type = other RNA
ttatcacttttga

SEQ ID NO: 2998 - RNA, 14 nt, synthetic construct
  source 1..14: mol_type = other RNA
ttatcacttttgaa

SEQ ID NO: 2999 - RNA, 15 nt, synthetic construct
  source 1..15: mol_type = other RNA
ttatcacttttgaaa

SEQ ID NO: 3000 - RNA, 16 nt, synthetic construct
  source 1..16: mol_type = other RNA
ttatcacttttgaaat

SEQ ID NO: 3001 - RNA, 17 nt, synthetic construct
  source 1..17: mol_type = other RNA
ttatcacttttgaaatg

SEQ ID NO: 3002 - RNA, 18 nt, synthetic construct
  source 1..18: mol_type = other RNA
ttatcacttttgaaatgt

SEQ ID NO: 3003 - RNA, 19 nt, synthetic construct
  source 1..19: mol_type = other RNA
ttatcacttttgaaatgtt

SEQ ID NO: 3004 - RNA, 12 nt, synthetic construct
  source 1..12: mol_type = other RNA
agtatttaaaat

SEQ ID NO: 3005 - RNA, 13 nt, synthetic construct
  source 1..13: mol_type = other RNA
gagtatttaaaat

SEQ ID NO: 3006 - RNA, 14 nt, synthetic construct
  source 1..14: mol_type = other RNA
tgagtatttaaaat

SEQ ID NO: 3007 - RNA, 15 nt, synthetic construct
  source 1..15: mol_type = other RNA
gtgagtatttaaaat

SEQ ID NO: 3008 - RNA, 16 nt, synthetic construct
  source 1..16: mol_type = other RNA
tgtgagtatttaaaat

SEQ ID NO: 3009 - RNA, 17 nt, synthetic construct
  source 1..17: mol_type = other RNA
atgtgagtatttaaaat

SEQ ID NO: 3010 - RNA, 18 nt, synthetic construct
  source 1..18: mol_type = other RNA
aatgtgagtatttaaaat

SEQ ID NO: 3011 - RNA, 19 nt, synthetic construct
  source 1..19: mol_type = other RNA
aaatgtgagtatttaaaat

SEQ ID NO: 3012 - RNA, 20 nt, synthetic construct
  source 1..20: mol_type = other RNA
aaaatgtgagtatttaaaat

SEQ ID NO: 3013 - RNA, 21 nt, synthetic construct
  source 1..21: mol_type = other RNA
aaaaatgtgagtatttaaaat

SEQ ID NO: 3014 - RNA, 22 nt, synthetic construct
  source 1..22: mol_type = other RNA
taaaaatgtgagtatttaaaat

SEQ ID NO: 3015 - RNA, 23 nt, synthetic construct
  source 1..23: mol_type = other RNA
ttaaaaatgtgagtatttaaaat

SEQ ID NO: 3016 - RNA, 24 nt, synthetic construct
  source 1..24: mol_type = other RNA
cttaaaaatgtgagtatttaaaat

SEQ ID NO: 3017 - RNA, 25 nt, synthetic construct
  source 1..25: mol_type = other RNA
gcttaaaaatgtgagtatttaaaat

SEQ ID NO: 3018 - RNA, 26 nt, synthetic construct
  source 1..26: mol_type = other RNA
tgcttaaaaatgtgagtatttaaaat

SEQ ID NO: 3019 - RNA, 27 nt, synthetic construct
  source 1..27: mol_type = other RNA
ttgcttaaaaatgtgagtatttaaaat

SEQ ID NO: 3020 - RNA, 28 nt, synthetic construct
  source 1..28: mol_type = other RNA
tttgcttaaaaatgtgagtatttaaaat

SEQ ID NO: 3021 - RNA, 29 nt, synthetic construct
  source 1..29: mol_type = other RNA
gtttgcttaaaaatgtgagtatttaaaat

SEQ ID NO: 3022 - RNA, 30 nt, synthetic construct
  source 1..30: mol_type = other RNA
ggtttgcttaaaaatgtgagtatttaaaat

SEQ ID NO: 3023 - RNA, 31 nt, synthetic construct
  source 1..31: mol_type = other RNA
tggtttgcttaaaaatgtgagtatttaaaat

SEQ ID NO: 3024 - RNA, 32 nt, synthetic construct
  source 1..32: mol_type = other RNA
ctggtttgcttaaaaatgtgagtatttaaaat

SEQ ID NO: 3025 - RNA, 33 nt, synthetic construct
  source 1..33: mol_type = other RNA
cctggtttgcttaaaaatgtgagtatttaaaat

SEQ ID NO: 3026 - RNA, 34 nt, synthetic construct
  source 1..34: mol_type = other RNA
tcctggtttgcttaaaaatgtgagtatttaaaat

SEQ ID NO: 3027 - RNA, 35 nt, synthetic construct
  source 1..35: mol_type = other RNA
atcctggtttgcttaaaaatgtgagtatttaaaat

SEQ ID NO: 3028 - RNA, 36 nt, synthetic construct
  source 1..36: mol_type = other RNA
tatcctggtttgcttaaaaatgtgagtatttaaaat

SEQ ID NO: 3029 - RNA, 37 nt, synthetic construct
  source 1..37: mol_type = other RNA
ctatcctggtttgcttaaaaatgtgagtatttaaaat

SEQ ID NO: 3030 - RNA, 38 nt, synthetic construct
  source 1..38: mol_type = other RNA
actatcctggtttgcttaaaaatgtgagtatttaaaat

SEQ ID NO: 3031 - RNA, 39 nt, synthetic construct
  source 1..39: mol_type = other RNA
tactatcctggtttgcttaaaaatgtgagtatttaaaat

SEQ ID NO: 3032 - RNA, 40 nt, synthetic construct
  source 1..40: mol_type = other RNA
ttactatcctggtttgcttaaaaatgtgagtatttaaaat

SEQ ID NO: 3033 - RNA, 17 nt, synthetic construct
  source 1..17: mol_type = other RNA
gtttgcttaaaaatgtg

SEQ ID NO: 3034 - RNA, 18 nt, synthetic construct
  source 1..18: mol_type = other RNA
ggtttgcttaaaaatgtg

SEQ ID NO: 3035 - RNA, 19 nt, synthetic construct
  source 1..19: mol_type = other RNA
tggtttgcttaaaaatgtg

SEQ ID NO: 3036 - RNA, 21 nt, synthetic construct
  source 1..21: mol_type = other RNA
cctggtttgcttaaaaatgtg

SEQ ID NO: 3037 - RNA, 22 nt, synthetic construct
  source 1..22: mol_type = other RNA
tcctggtttgcttaaaaatgtg

SEQ ID NO: 3038-3042 - skipped (5 entries)

SEQ ID NO: 3043 - RNA, 10 nt, synthetic construct
  source 1..10: mol_type = other RNA
atttttaagc

SEQ ID NO: 3044 - RNA, 11 nt, synthetic construct
  source 1..11: mol_type = other RNA
atttttaagca

SEQ ID NO: 3045 - RNA, 12 nt, synthetic construct
  source 1..12: mol_type = other RNA
atttttaagcaa

SEQ ID NO: 3046 - RNA, 13 nt, synthetic construct
  source 1..13: mol_type = other RNA
atttttaagcaaa

SEQ ID NO: 3047 - RNA, 14 nt, synthetic construct
  source 1..14: mol_type = other RNA
atttttaagcaaac

SEQ ID NO: 3048 - RNA, 15 nt, synthetic construct
  source 1..15: mol_type = other RNA
atttttaagcaaacc

SEQ ID NO: 3049 - RNA, 16 nt, synthetic construct
  source 1..16: mol_type = other RNA
atttttaagcaaacca

SEQ ID NO: 3050 - RNA, 17 nt, synthetic construct
  source 1..17: mol_type = other RNA
atttttaagcaaaccag

SEQ ID NO: 3051 - RNA, 18 nt, synthetic construct
  source 1..18: mol_type = other RNA
atttttaagcaaaccagg

SEQ ID NO: 3052 - RNA, 19 nt, synthetic construct
  source 1..19: mol_type = other RNA
atttttaagcaaaccagga

SEQ ID NO: 3053 - RNA, 10 nt, synthetic construct
  source 1..10: mol_type = other RNA
aaatactcac

SEQ ID NO: 3054 - RNA, 11 nt, synthetic construct
  source 1..11: mol_type = other RNA
taaatactcac

SEQ ID NO: 3055 - RNA, 12 nt, synthetic construct
  source 1..12: mol_type = other RNA
ttaaatactcac

SEQ ID NO: 3056 - RNA, 13 nt, synthetic construct
  source 1..13: mol_type = other RNA
tttaaatactcac

SEQ ID NO: 3057 - RNA, 14 nt, synthetic construct
  source 1..14: mol_type = other RNA
ttttaaatactcac

SEQ ID NO: 3058 - RNA, 15 nt, synthetic construct
  source 1..15: mol_type = other RNA
attttaaatactcac

SEQ ID NO: 3059 - RNA, 16 nt, synthetic construct
  source 1..16: mol_type = other RNA
aattttaaatactcac

SEQ ID NO: 3060 - RNA, 17 nt, synthetic construct
  source 1..17: mol_type = other RNA
aaattttaaatactcac

SEQ ID NO: 3061 - RNA, 18 nt, synthetic construct
  source 1..18: mol_type = other RNA
taaattttaaatactcac

SEQ ID NO: 3062 - RNA, 19 nt, synthetic construct
  source 1..19: mol_type = other RNA
ataaattttaaatactcac

SEQ ID NO: 3063 - RNA, 20 nt, synthetic construct
  source 1..20: mol_type = other RNA
gataaattttaaatactcac

SEQ ID NO: 3064 - RNA, 21 nt, synthetic construct
  source 1..21: mol_type = other RNA
tgataaattttaaatactcac

SEQ ID NO: 3065 - RNA, 22 nt, synthetic construct
  source 1..22: mol_type = other RNA
gtgataaattttaaatactcac

SEQ ID NO: 3066 - RNA, 23 nt, synthetic construct
  source 1..23: mol_type = other RNA
agtgataaattttaaatactcac

SEQ ID NO: 3067 - RNA, 24 nt, synthetic construct
  source 1..24: mol_type = other RNA
aagtgataaattttaaatactcac

SEQ ID NO: 3068 - RNA, 25 nt, synthetic construct
  source 1..25: mol_type = other RNA
aaagtgataaattttaaatactcac

SEQ ID NO: 3069 - RNA, 26 nt, synthetic construct
  source 1..26: mol_type = other RNA
aaaagtgataaattttaaatactcac

SEQ ID NO: 3070 - RNA, 27 nt, synthetic construct
  source 1..27: mol_type = other RNA
caaaagtgataaattttaaatactcac

SEQ ID NO: 3071 - RNA, 28 nt, synthetic construct
  source 1..28: mol_type = other RNA
tcaaaagtgataaattttaaatactcac

SEQ ID NO: 3072 - RNA, 29 nt, synthetic construct
  source 1..29: mol_type = other RNA
ttcaaaagtgataaattttaaatactcac

SEQ ID NO: 3073 - RNA, 30 nt, synthetic construct
  source 1..30: mol_type = other RNA
tttcaaaagtgataaattttaaatactcac

SEQ ID NO: 3074 - RNA, 31 nt, synthetic construct
  source 1..31: mol_type = other RNA
atttcaaaagtgataaattttaaatactcac

SEQ ID NO: 3075 - RNA, 32 nt, synthetic construct
  source 1..32: mol_type = other RNA
catttcaaaagtgataaattttaaatactcac

SEQ ID NO: 3076 - RNA, 33 nt, synthetic construct
  source 1..33: mol_type = other RNA
acatttcaaaagtgataaattttaaatactcac

SEQ ID NO: 3077 - RNA, 34 nt, synthetic construct
  source 1..34: mol_type = other RNA
aacatttcaaaagtgataaattttaaatactcac

SEQ ID NO: 3078 - RNA, 35 nt, synthetic construct
  source 1..35: mol_type = other RNA
aaacatttcaaaagtgataaattttaaatactcac

SEQ ID NO: 3079 - RNA, 36 nt, synthetic construct
  source 1..36: mol_type = other RNA
taaacatttcaaaagtgataaattttaaatactcac

SEQ ID NO: 3080 - RNA, 37 nt, synthetic construct
  source 1..37: mol_type = other RNA
ttaaacatttcaaaagtgataaattttaaatactcac

SEQ ID NO: 3081 - RNA, 38 nt, synthetic construct
  source 1..38: mol_type = other RNA
attaaacatttcaaaagtgataaattttaaatactcac

SEQ ID NO: 3082 - RNA, 39 nt, synthetic construct
  source 1..39: mol_type = other RNA
cattaaacatttcaaaagtgataaattttaaatactcac

SEQ ID NO: 3083 - RNA, 40 nt, synthetic construct
  source 1..40: mol_type = other RNA
gcattaaacatttcaaaagtgataaattttaaatactcac

SEQ ID NO: 3084 - RNA, 20 nt, synthetic construct
  source 1..20: mol_type = other RNA
agaagagataaacaaagaaa

SEQ ID NO: 3085 - RNA, 20 nt, synthetic construct
  source 1..20: mol_type = other RNA
aggtaagaagagataaacaa

SEQ ID NO: 3086 - RNA, 17 nt, synthetic construct
  source 1..17: mol_type = other RNA
cctatagattactatcc

SEQ ID NO: 3087 - RNA, 18 nt, synthetic construct
  source 1..18: mol_type = other RNA
acctatagattactatcc

SEQ ID NO: 3088 - RNA, 19 nt, synthetic construct
  source 1..19: mol_type = other RNA
cacctatagattactatcc

SEQ ID NO: 3089 - RNA, 21 nt, synthetic construct
  source 1..21: mol_type = other RNA
tgcacctatagattactatcc

SEQ ID NO: 3090 - RNA, 22 nt, synthetic construct
  source 1..22: mol_type = other RNA
atgcacctatagattactatcc

SEQ ID NO: 3091-3095 - skipped (5 entries)

SEQ ID NO: 3096 - RNA, 10 nt, synthetic construct
  source 1..10: mol_type = other RNA
tagtaatcta

SEQ ID NO: 3097 - RNA, 11 nt, synthetic construct
  source 1..11: mol_type = other RNA
tagtaatctat

SEQ ID NO: 3098 - RNA, 12 nt, synthetic construct
  source 1..12: mol_type = other RNA
tagtaatctata

SEQ ID NO: 3099 - RNA, 13 nt, synthetic construct
  source 1..13: mol_type = other RNA
tagtaatctatag

SEQ ID NO: 3100 - RNA, 14 nt, synthetic construct
  source 1..14: mol_type = other RNA
tagtaatctatagg

SEQ ID NO: 3101 - RNA, 15 nt, synthetic construct
  source 1..15: mol_type = other RNA
tagtaatctataggt

SEQ ID NO: 3102 - RNA, 16 nt, synthetic construct
  source 1..16: mol_type = other RNA
tagtaatctataggtg

SEQ ID NO: 3103 - RNA, 17 nt, synthetic construct
  source 1..17: mol_type = other RNA
tagtaatctataggtgc

SEQ ID NO: 3104 - RNA, 18 nt, synthetic construct
  source 1..18: mol_type = other RNA
tagtaatctataggtgca

SEQ ID NO: 3105 - RNA, 19 nt, synthetic construct
  source 1..19: mol_type = other RNA
tagtaatctataggtgcat

SEQ ID NO: 3106 - RNA, 23 nt, synthetic construct
  source 1..23: mol_type = other RNA
tcacatttttaagcaaaccagga

SEQ ID NO: 3107 - RNA, 24 nt, synthetic construct
  source 1..24: mol_type = other RNA
ctcacatttttaagcaaaccagga

SEQ ID NO: 3108 - RNA, 25 nt, synthetic construct
  source 1..25: mol_type = other RNA
actcacatttttaagcaaaccagga

SEQ ID NO: 3109 - RNA, 26 nt, synthetic construct
  source 1..26: mol_type = other RNA
tactcacatttttaagcaaaccagga

SEQ ID NO: 3110 - RNA, 27 nt, synthetic construct
  source 1..27: mol_type = other RNA
atactcacatttttaagcaaaccagga

SEQ ID NO: 3111 - RNA, 28 nt, synthetic construct
  source 1..28: mol_type = other RNA
aatactcacatttttaagcaaaccagga

SEQ ID NO: 3112 - RNA, 29 nt, synthetic construct
  source 1..29: mol_type = other RNA
aaatactcacatttttaagcaaaccagga

SEQ ID NO: 3113 - RNA, 30 nt, synthetic construct
  source 1..30: mol_type = other RNA
taaatactcacatttttaagcaaaccagga

SEQ ID NO: 3114 - RNA, 31 nt, synthetic construct
  source 1..31: mol_type = other RNA
ttaaatactcacatttttaagcaaaccagga

SEQ ID NO: 3115 - RNA, 32 nt, synthetic construct
  source 1..32: mol_type = other RNA
tttaaatactcacatttttaagcaaaccagga

SEQ ID NO: 3116 - RNA, 33 nt, synthetic construct
  source 1..33: mol_type = other RNA
ttttaaatactcacatttttaagcaaaccagga

SEQ ID NO: 3117 - RNA, 34 nt, synthetic construct
  source 1..34: mol_type = other RNA
attttaaatactcacatttttaagcaaaccagga

SEQ ID NO: 3118 - RNA, 35 nt, synthetic construct
  source 1..35: mol_type = other RNA
aattttaaatactcacatttttaagcaaaccagga

SEQ ID NO: 3119 - RNA, 36 nt, synthetic construct
  source 1..36: mol_type = other RNA
aaattttaaatactcacatttttaagcaaaccagga

SEQ ID NO: 3120 - RNA, 37 nt, synthetic construct
  source 1..37: mol_type = other RNA
taaattttaaatactcacatttttaagcaaaccagga

SEQ ID NO: 3121 - RNA, 38 nt, synthetic construct
  source 1..38: mol_type = other RNA
ataaattttaaatactcacatttttaagcaaaccagga

SEQ ID NO: 3122 - RNA, 39 nt, synthetic construct
  source 1..39: mol_type = other RNA
gataaattttaaatactcacatttttaagcaaaccagga

SEQ ID NO: 3123 - RNA, 40 nt, synthetic construct
  source 1..40: mol_type = other RNA
tgataaattttaaatactcacatttttaagcaaaccagga

SEQ ID NO: 3124 - RNA, 131 nt, synthetic construct
  source 1..131: mol_type = other RNA
gcacctatagattactatccgttttagagctagaaatagcaagttaaaataaggctagtccgttatcaacttgaaaaagtggcaccgagtcggtgcatactcacatttttaagcaaaccaggatagtaatc

SEQ ID NO: 3125 - RNA, 133 nt, synthetic construct
  source 1..133: mol_type = other RNA
gcacctatagattactatccgttttagagctagaaatagcaagttaaaataaggctagtccgttatcaacttgaaaaagtggcaccgagtcggtgcatactcacatttttaagcaaaccaggatagtaatcta

SEQ ID NO: 3126 - RNA, 133 nt, synthetic construct
  source 1..133: mol_type = other RNA
gcacctatagattactatccgttttagagctagaaatagcaagttaaaataaggctagtccgttatcaacttgaaaaagtggcaccgagtcggtgcaaatactcacatttttaagcaaaccaggatagtaatc

SEQ ID NO: 3127 - RNA, 135 nt, synthetic construct
  source 1..135: mol_type = other RNA
gcacctatagattactatccgttttagagctagaaatagcaagttaaaataaggctagtccgttatcaacttgaaaaagtggcaccgagtcggtgcatactcacatttttaagcaaaccaggatagtaatctttt

SEQ ID NO: 3128 - RNA, 135 nt, synthetic construct
  source 1..135: mol_type = other RNA
gcacctatagattactatccgttttagagctagaaatagcaagttaaaataaggctagtccgttatcaacttgaaaaagtggcaccgagtcggtgcatactcacatttttaagcaaaccaggatagtaatctata

SEQ ID NO: 3129 - RNA, 135 nt, synthetic construct
  source 1..135: mol_type = other RNA
gcacctatagattactatccgttttagagctagaaatagcaagttaaaataaggctagtccgttatcaacttgaaaaagtggcaccgagtcggtgcaaatactcacatttttaagcaaaccaggatagtaatcta

SEQ ID NO: 3130 - RNA, 135 nt, synthetic construct
  source 1..135: mol_type = other RNA
gcacctatagattactatccgttttagagctagaaatagcaagttaaaataaggctagtccgttatcaacttgaaaaagtggcaccgagtcggtgcttaaatactcacatttttaagcaaaccaggatagtaatc

SEQ ID NO: 3131 - RNA, 137 nt, synthetic construct
  source 1..137: mol_type = other RNA
gcacctatagattactatccgttttagagctagaaatagcaagttaaaataaggctagtccgttatcaacttgaaaaagtggcaccgagtcggtgcatactcacatttttaagcaaaccaggatagtaatctatttt

SEQ ID NO: 3132 - RNA, 137 nt, synthetic construct
  source 1..137: mol_type = other RNA
gcacctatagattactatccgttttagagctagaaatagcaagttaaaataaggctagtccgttatcaacttgaaaaagtggcaccgagtcggtgcaaatactcacatttttaagcaaaccaggatagtaatctttt

SEQ ID NO: 3133 - RNA, 137 nt, synthetic construct
  source 1..137: mol_type = other RNA
gcacctatagattactatccgttttagagctagaaatagcaagttaaaataaggctagtccgttatcaacttgaaaaagtggcaccgagtcggtgcatactcacatttttaagcaaaccaggatagtaatctatagg

SEQ ID NO: 3134 - RNA, 137 nt, synthetic construct
  source 1..137: mol_type = other RNA
gcacctatagattactatccgttttagagctagaaatagcaagttaaaataaggctagtccgttatcaacttgaaaaagtggcaccgagtcggtgcaaatactcacatttttaagcaaaccaggatagtaatctata

SEQ ID NO: 3135 - RNA, 137 nt, synthetic construct
  source 1..137: mol_type = other RNA
gcacctatagattactatccgttttagagctagaaatagcaagttaaaataaggctagtccgttatcaacttgaaaaagtggcaccgagtcggtgcttaaatactcacatttttaagcaaaccaggatagtaatcta

SEQ ID NO: 3136 - RNA, 137 nt, synthetic construct
  source 1..137: mol_type = other RNA
gcacctatagattactatccgttttagagctagaaatagcaagttaaaataaggctagtccgttatcaacttgaaaaagtggcaccgagtcggtgcttttaaatactcacatttttaagcaaaccaggatagtaatc

SEQ ID NO: 3137 - RNA, 139 nt, synthetic construct
  source 1..139: mol_type = other RNA
gcacctatagattactatccgttttagagctagaaatagcaagttaaaataaggctagtccgttatcaacttgaaaaagtggcaccgagtcggtgcatactcacatttttaagcaaaccaggatagtaatctatatttt

SEQ ID NO: 3138 - RNA, 139 nt, synthetic construct
  source 1..139: mol_type = other RNA
gcacctatagattactatccgttttagagctagaaatagcaagttaaaataaggctagtccgttatcaacttgaaaaagtggcaccgagtcggtgcaaatactcacatttttaagcaaaccaggatagtaatctatttt

SEQ ID NO: 3139 - RNA, 139 nt, synthetic construct
  source 1..139: mol_type = other RNA
gcacctatagattactatccgttttagagctagaaatagcaagttaaaataaggctagtccgttatcaacttgaaaaagtggcaccgagtcggtgcttaaatactcacatttttaagcaaaccaggatagtaatctttt

SEQ ID NO: 3140 - RNA, 139 nt, synthetic construct
  source 1..139: mol_type = other RNA
gcacctatagattactatccgttttagagctagaaatagcaagttaaaataaggctagtccgttatcaacttgaaaaagtggcaccgagtcggtgcaaatactcacatttttaagcaaaccaggatagtaatctatagg

SEQ ID NO: 3141 - RNA, 139 nt, synthetic construct
  source 1..139: mol_type = other RNA
gcacctatagattactatccgttttagagctagaaatagcaagttaaaataaggctagtccgttatcaacttgaaaaagtggcaccgagtcggtgcttaaatactcacatttttaagcaaaccaggatagtaatctata

SEQ ID NO: 3142 - RNA, 139 nt, synthetic construct
  source 1..139: mol_type = other RNA
gcacctatagattactatccgttttagagctagaaatagcaagttaaaataaggctagtccgttatcaacttgaaaaagtggcaccgagtcggtgcttttaaatactcacatttttaagcaaaccaggatagtaatcta

SEQ ID NO: 3143 - RNA, 141 nt, synthetic construct
  source 1..141: mol_type = other RNA
gcacctatagattactatccgttttagagctagaaatagcaagttaaaataaggctagtccgttatcaacttgaaaaagtggcaccgagtcggtgcatactcacatttttaagcaaaccaggatagtaatctataggtttt

SEQ ID NO: 3144 - RNA, 141 nt, synthetic construct
  source 1..141: mol_type = other RNA
gcacctatagattactatccgttttagagctagaaatagcaagttaaaataaggctagtccgttatcaacttgaaaaagtggcaccgagtcggtgcaaatactcacatttttaagcaaaccaggatagtaatctatatttt

SEQ ID NO: 3145 - RNA, 141 nt, synthetic construct
  source 1..141: mol_type = other RNA
gcacctatagattactatccgttttagagctagaaatagcaagttaaaataaggctagtccgttatcaacttgaaaaagtggcaccgagtcggtgcttaaatactcacatttttaagcaaaccaggatagtaatctatttt

SEQ ID NO: 3146 - RNA, 141 nt, synthetic construct
  source 1..141: mol_type = other RNA
gcacctatagattactatccgttttagagctagaaatagcaagttaaaataaggctagtccgttatcaacttgaaaaagtggcaccgagtcggtgcttttaaatactcacatttttaagcaaaccaggatagtaatctttt

SEQ ID NO: 3147 - RNA, 141 nt, synthetic construct
  source 1..141: mol_type = other RNA
gcacctatagattactatccgttttagagctagaaatagcaagttaaaataaggctagtccgttatcaacttgaaaaagtggcaccgagtcggtgcttaaatactcacatttttaagcaaaccaggatagtaatctatagg

SEQ ID NO: 3148 - RNA, 141 nt, synthetic construct
  source 1..141: mol_type = other RNA
gcacctatagattactatccgttttagagctagaaatagcaagttaaaataaggctagtccgttatcaacttgaaaaagtggcaccgagtcggtgcttttaaatactcacatttttaagcaaaccaggatagtaatctata

SEQ ID NO: 3149 - RNA, 143 nt, synthetic construct
  source 1..143: mol_type = other RNA
gcacctatagattactatccgttttagagctagaaatagcaagttaaaataaggctagtccgttatcaacttgaaaaagtggcaccgagtcggtgcaaatactcacatttttaagcaaaccaggatagtaatctataggtttt

SEQ ID NO: 3150 - RNA, 143 nt, synthetic construct
  source 1..143: mol_type = other RNA
gcacctatagattactatccgttttagagctagaaatagcaagttaaaataaggctagtccgttatcaacttgaaaaagtggcaccgagtcggtgcttaaatactcacatttttaagcaaaccaggatagtaatctatatttt

SEQ ID NO: 3151 - RNA, 143 nt, synthetic construct
  source 1..143: mol_type = other RNA
gcacctatagattactatccgttttagagctagaaatagcaagttaaaataaggctagtccgttatcaacttgaaaaagtggcaccgagtcggtgcttttaaatactcacatttttaagcaaaccaggatagtaatctatttt

SEQ ID NO: 3152 - RNA, 143 nt, synthetic construct
  source 1..143: mol_type = other RNA
gcacctatagattactatccgttttagagctagaaatagcaagttaaaataaggctagtccgttatcaacttgaaaaagtggcaccgagtcggtgcttttaaatactcacatttttaagcaaaccaggatagtaatctatagg

SEQ ID NO: 3153 - RNA, 145 nt, synthetic construct
  source 1..145: mol_type = other RNA
gcacctatagattactatccgttttagagctagaaatagcaagttaaaataaggctagtccgttatcaacttgaaaaagtggcaccgagtcggtgcttaaatactcacatttttaagcaaaccaggatagtaatctataggtttt

SEQ ID NO: 3154 - RNA, 145 nt, synthetic construct
  source 1..145: mol_type = other RNA
gcacctatagattactatccgttttagagctagaaatagcaagttaaaataaggctagtccgttatcaacttgaaaaagtggcaccgagtcggtgcttttaaatactcacatttttaagcaaaccaggatagtaatctatatttt

SEQ ID NO: 3155 - RNA, 147 nt, synthetic construct
  source 1..147: mol_type = other RNA
gcacctatagattactatccgttttagagctagaaatagcaagttaaaataaggctagtccgttatcaacttgaaaaagtggcaccgagtcggtgcttttaaatactcacatttttaagcaaaccaggatagtaatctataggtttt

SEQ ID NO: 3156 - RNA, 17 nt, synthetic construct
  source 1..17: mol_type = other RNA
cttgggtatgcacctat

SEQ ID NO: 3157 - RNA, 18 nt, synthetic construct
  source 1..18: mol_type = other RNA
tcttgggtatgcacctat

SEQ ID NO: 3158 - RNA, 19 nt, synthetic construct
  source 1..19: mol_type = other RNA
gtcttgggtatgcacctat

SEQ ID NO: 3159 - RNA, 21 nt, synthetic construct
  source 1..21: mol_type = other RNA
aggtcttgggtatgcacctat

SEQ ID NO: 3160 - RNA, 22 nt, synthetic construct
  source 1..22: mol_type = other RNA
aaggtcttgggtatgcacctat

SEQ ID NO: 3161-3165 - skipped (5 entries)

SEQ ID NO: 3166 - RNA, 10 nt, synthetic construct
  source 1..10: mol_type = other RNA
ggtgcatacc

SEQ ID NO: 3167 - RNA, 11 nt, synthetic construct
  source 1..11: mol_type = other RNA
ggtgcataccc

SEQ ID NO: 3168 - RNA, 12 nt, synthetic construct
  source 1..12: mol_type = other RNA
ggtgcataccca

SEQ ID NO: 3169 - RNA, 13 nt, synthetic construct
  source 1..13: mol_type = other RNA
ggtgcatacccaa

SEQ ID NO: 3170 - RNA, 14 nt, synthetic construct
  source 1..14: mol_type = other RNA
ggtgcatacccaag

SEQ ID NO: 3171 - RNA, 15 nt, synthetic construct
  source 1..15: mol_type = other RNA
ggtgcatacccaaga

SEQ ID NO: 3172 - RNA, 16 nt, synthetic construct
  source 1..16: mol_type = other RNA
ggtgcatacccaagac

SEQ ID NO: 3173 - RNA, 17 nt, synthetic construct
  source 1..17: mol_type = other RNA
ggtgcatacccaagacc

SEQ ID NO: 3174 - RNA, 18 nt, synthetic construct
  source 1..18: mol_type = other RNA
ggtgcatacccaagacct

SEQ ID NO: 3175 - RNA, 19 nt, synthetic construct
  source 1..19: mol_type = other RNA
ggtgcatacccaagacctt

SEQ ID NO: 3176 - RNA, 35 nt, synthetic construct
  source 1..35: mol_type = other RNA
tcacatttttaagcaaaccaggatagtaatctata

SEQ ID NO: 3177 - RNA, 36 nt, synthetic construct
  source 1..36: mol_type = other RNA
ctcacatttttaagcaaaccaggatagtaatctata

SEQ ID NO: 3178 - RNA, 37 nt, synthetic construct
  source 1..37: mol_type = other RNA
actcacatttttaagcaaaccaggatagtaatctata

SEQ ID NO: 3179 - RNA, 38 nt, synthetic construct
  source 1..38: mol_type = other RNA
tactcacatttttaagcaaaccaggatagtaatctata

SEQ ID NO: 3180 - RNA, 39 nt, synthetic construct
  source 1..39: mol_type = other RNA
atactcacatttttaagcaaaccaggatagtaatctata

SEQ ID NO: 3181 - RNA, 40 nt, synthetic construct
  source 1..40: mol_type = other RNA
aatactcacatttttaagcaaaccaggatagtaatctata

SEQ ID NO: 3182 - RNA, 20 nt, synthetic construct
  source 1..20: mol_type = other RNA
aaaccaggatagtaatctat

SEQ ID NO: 3183 - RNA, 20 nt, synthetic construct
  source 1..20: mol_type = other RNA
aaccaggatagtaatctata

SEQ ID NO: 3184 - RNA, 20 nt, synthetic construct
  source 1..20: mol_type = other RNA
ccaggatagtaatctatagg

SEQ ID NO: 3185 - RNA, 17 nt, synthetic construct
  source 1..17: mol_type = other RNA
agattactatcctggtt

SEQ ID NO: 3186 - RNA, 18 nt, synthetic construct
  source 1..18: mol_type = other RNA
tagattactatcctggtt

SEQ ID NO: 3187 - RNA, 19 nt, synthetic construct
  source 1..19: mol_type = other RNA
atagattactatcctggtt

SEQ ID NO: 3188 - RNA, 21 nt, synthetic construct
  source 1..21: mol_type = other RNA
ctatagattactatcctggtt

SEQ ID NO: 3189 - RNA, 22 nt, synthetic construct
  source 1..22: mol_type = other RNA
cctatagattactatcctggtt

SEQ ID NO: 3190-3194 - skipped (5 entries)

SEQ ID NO: 3195 - RNA, 10 nt, synthetic construct
  source 1..10: mol_type = other RNA
caggatagta

SEQ ID NO: 3196 - RNA, 11 nt, synthetic construct
  source 1..11: mol_type = other RNA
caggatagtaa

SEQ ID NO: 3197 - RNA, 12 nt, synthetic construct
  source 1..12: mol_type = other RNA
caggatagtaat

SEQ ID NO: 3198 - RNA, 13 nt, synthetic construct
  source 1..13: mol_type = other RNA
caggatagtaatc

SEQ ID NO: 3199 - RNA, 14 nt, synthetic construct
  source 1..14: mol_type = other RNA
caggatagtaatct

SEQ ID NO: 3200 - RNA, 15 nt, synthetic construct
  source 1..15: mol_type = other RNA
caggatagtaatcta

SEQ ID NO: 3201 - RNA, 16 nt, synthetic construct
  source 1..16: mol_type = other RNA
caggatagtaatctat

SEQ ID NO: 3202 - RNA, 17 nt, synthetic construct
  source 1..17: mol_type = other RNA
caggatagtaatctata

SEQ ID NO: 3203 - RNA, 18 nt, synthetic construct
  source 1..18: mol_type = other RNA
caggatagtaatctatag

SEQ ID NO: 3204 - RNA, 19 nt, synthetic construct
  source 1..19: mol_type = other RNA
caggatagtaatctatagg

SEQ ID NO: 3205 - RNA, 18 nt, synthetic construct
  source 1..18: mol_type = other RNA
tcacatttttaagaagac

SEQ ID NO: 3206 - RNA, 18 nt, synthetic construct
  source 1..18: mol_type = other RNA
tcacatttttaagcaaac

SEQ ID NO: 3207 - RNA, 18 nt, synthetic construct
  source 1..18: mol_type = other RNA
tcacatttttaaggagac

SEQ ID NO: 3208 - RNA, 18 nt, synthetic construct
  source 1..18: mol_type = other RNA
tcacatttttaagtaaac

SEQ ID NO: 3209 - RNA, 18 nt, synthetic construct
  source 1..18: mol_type = other RNA
tcacatttttaagtagac

SEQ ID NO: 3210 - RNA, 19 nt, synthetic construct
  source 1..19: mol_type = other RNA
ctcacatttttaagaagac

SEQ ID NO: 3211 - RNA, 19 nt, synthetic construct
  source 1..19: mol_type = other RNA
ctcacatttttaagcaaac

SEQ ID NO: 3212 - RNA, 19 nt, synthetic construct
  source 1..19: mol_type = other RNA
ctcacatttttaaggagac

SEQ ID NO: 3213 - RNA, 19 nt, synthetic construct
  source 1..19: mol_type = other RNA
ctcacatttttaagtaaac

SEQ ID NO: 3214 - RNA, 19 nt, synthetic construct
  source 1..19: mol_type = other RNA
ctcacatttttaagtagac

SEQ ID NO: 3215 - RNA, 20 nt, synthetic construct
  source 1..20: mol_type = other RNA
actcacatttttaagaagac

SEQ ID NO: 3216 - RNA, 20 nt, synthetic construct
  source 1..20: mol_type = other RNA
actcacatttttaaggagac

SEQ ID NO: 3217 - RNA, 20 nt, synthetic construct
  source 1..20: mol_type = other RNA
actcacatttttaagtaaac

SEQ ID NO: 3218 - RNA, 20 nt, synthetic construct
  source 1..20: mol_type = other RNA
actcacatttttaagtagac

SEQ ID NO: 3219 - RNA, 21 nt, synthetic construct
  source 1..21: mol_type = other RNA
tactcacatttttaagaagac

SEQ ID NO: 3220 - RNA, 21 nt, synthetic construct
  source 1..21: mol_type = other RNA
tactcacatttttaagcaaac

SEQ ID NO: 3221 - RNA, 21 nt, synthetic construct
  source 1..21: mol_type = other RNA
tactcacatttttaaggagac

SEQ ID NO: 3222 - RNA, 21 nt, synthetic construct
  source 1..21: mol_type = other RNA
tactcacatttttaagtaaac

SEQ ID NO: 3223 - RNA, 21 nt, synthetic construct
  source 1..21: mol_type = other RNA
tactcacatttttaagtagac

SEQ ID NO: 3224 - RNA, 22 nt, synthetic construct
  source 1..22: mol_type = other RNA
atactcacatttttaagaagac

SEQ ID NO: 3225 - RNA, 22 nt, synthetic construct
  source 1..22: mol_type = other RNA
atactcacatttttaagcaaac

SEQ ID NO: 3226 - RNA, 22 nt, synthetic construct
  source 1..22: mol_type = other RNA
atactcacatttttaaggagac

SEQ ID NO: 3227 - RNA, 22 nt, synthetic construct
  source 1..22: mol_type = other RNA
atactcacatttttaagtaaac

SEQ ID NO: 3228 - RNA, 22 nt, synthetic construct
  source 1..22: mol_type = other RNA
atactcacatttttaagtagac

SEQ ID NO: 3229 - RNA, 23 nt, synthetic construct
  source 1..23: mol_type = other RNA
aatactcacatttttaagaagac

SEQ ID NO: 3230 - RNA, 23 nt, synthetic construct
  source 1..23: mol_type = other RNA
aatactcacatttttaagcaaac

SEQ ID NO: 3231 - RNA, 23 nt, synthetic construct
  source 1..23: mol_type = other RNA
aatactcacatttttaaggagac

SEQ ID NO: 3232 - RNA, 23 nt, synthetic construct
  source 1..23: mol_type = other RNA
aatactcacatttttaagtaaac

SEQ ID NO: 3233 - RNA, 23 nt, synthetic construct
  source 1..23: mol_type = other RNA
aatactcacatttttaagtagac

SEQ ID NO: 3234 - RNA, 24 nt, synthetic construct
  source 1..24: mol_type = other RNA
aaatactcacatttttaagaagac

SEQ ID NO: 3235 - RNA, 24 nt, synthetic construct
  source 1..24: mol_type = other RNA
aaatactcacatttttaagcaaac

SEQ ID NO: 3236 - RNA, 24 nt, synthetic construct
  source 1..24: mol_type = other RNA
aaatactcacatttttaaggagac

SEQ ID NO: 3237 - RNA, 24 nt, synthetic construct
  source 1..24: mol_type = other RNA
aaatactcacatttttaagtaaac

SEQ ID NO: 3238 - RNA, 24 nt, synthetic construct
  source 1..24: mol_type = other RNA
aaatactcacatttttaagtagac

SEQ ID NO: 3239 - RNA, 25 nt, synthetic construct
  source 1..25: mol_type = other RNA
taaatactcacatttttaagaagac

SEQ ID NO: 3240 - RNA, 25 nt, synthetic construct
  source 1..25: mol_type = other RNA
taaatactcacatttttaagcaaac

SEQ ID NO: 3241 - RNA, 25 nt, synthetic construct
  source 1..25: mol_type = other RNA
taaatactcacatttttaaggagac

SEQ ID NO: 3242 - RNA, 25 nt, synthetic construct
  source 1..25: mol_type = other RNA
taaatactcacatttttaagtaaac

SEQ ID NO: 3243 - RNA, 25 nt, synthetic construct
  source 1..25: mol_type = other RNA
taaatactcacatttttaagtagac

SEQ ID NO: 3244 - RNA, 26 nt, synthetic construct
  source 1..26: mol_type = other RNA
ttaaatactcacatttttaagaagac

SEQ ID NO: 3245 - RNA, 26 nt, synthetic construct
  source 1..26: mol_type = other RNA
ttaaatactcacatttttaagcaaac

SEQ ID NO: 3246 - RNA, 26 nt, synthetic construct
  source 1..26: mol_type = other RNA
ttaaatactcacatttttaaggagac

SEQ ID NO: 3247 - RNA, 26 nt, synthetic construct
  source 1..26: mol_type = other RNA
ttaaatactcacatttttaagtaaac

SEQ ID NO: 3248 - RNA, 26 nt, synthetic construct
  source 1..26: mol_type = other RNA
ttaaatactcacatttttaagtagac

SEQ ID NO: 3249 - RNA, 27 nt, synthetic construct
  source 1..27: mol_type = other RNA
tttaaatactcacatttttaagaagac

SEQ ID NO: 3250 - RNA, 27 nt, synthetic construct
  source 1..27: mol_type = other RNA
tttaaatactcacatttttaagcaaac

SEQ ID NO: 3251 - RNA, 27 nt, synthetic construct
  source 1..27: mol_type = other RNA
tttaaatactcacatttttaaggagac

SEQ ID NO: 3252 - RNA, 27 nt, synthetic construct
  source 1..27: mol_type = other RNA
tttaaatactcacatttttaagtaaac

SEQ ID NO: 3253 - RNA, 27 nt, synthetic construct
  source 1..27: mol_type = other RNA
tttaaatactcacatttttaagtagac

SEQ ID NO: 3254 - RNA, 28 nt, synthetic construct
  source 1..28: mol_type = other RNA
ttttaaatactcacatttttaagaagac

SEQ ID NO: 3255 - RNA, 28 nt, synthetic construct
  source 1..28: mol_type = other RNA
ttttaaatactcacatttttaagcaaac

SEQ ID NO: 3256 - RNA, 28 nt, synthetic construct
  source 1..28: mol_type = other RNA
ttttaaatactcacatttttaaggagac

SEQ ID NO: 3257 - RNA, 28 nt, synthetic construct
  source 1..28: mol_type = other RNA
ttttaaatactcacatttttaagtaaac

SEQ ID NO: 3258 - RNA, 28 nt, synthetic construct
  source 1..28: mol_type = other RNA
ttttaaatactcacatttttaagtagac

SEQ ID NO: 3259 - RNA, 29 nt, synthetic construct
  source 1..29: mol_type = other RNA
attttaaatactcacatttttaagaagac

SEQ ID NO: 3260 - RNA, 29 nt, synthetic construct
  source 1..29: mol_type = other RNA
attttaaatactcacatttttaagcaaac

SEQ ID NO: 3261 - RNA, 29 nt, synthetic construct
  source 1..29: mol_type = other RNA
attttaaatactcacatttttaaggagac

SEQ ID NO: 3262 - RNA, 29 nt, synthetic construct
  source 1..29: mol_type = other RNA
attttaaatactcacatttttaagtaaac

SEQ ID NO: 3263 - RNA, 29 nt, synthetic construct
  source 1..29: mol_type = other RNA
attttaaatactcacatttttaagtagac

SEQ ID NO: 3264 - RNA, 30 nt, synthetic construct
  source 1..30: mol_type = other RNA
aattttaaatactcacatttttaagaagac

SEQ ID NO: 3265 - RNA, 30 nt, synthetic construct
  source 1..30: mol_type = other RNA
aattttaaatactcacatttttaagcaaac

SEQ ID NO: 3266 - RNA, 30 nt, synthetic construct
  source 1..30: mol_type = other RNA
aattttaaatactcacatttttaaggagac

SEQ ID NO: 3267 - RNA, 30 nt, synthetic construct
  source 1..30: mol_type = other RNA
aattttaaatactcacatttttaagtaaac

SEQ ID NO: 3268 - RNA, 30 nt, synthetic construct
  source 1..30: mol_type = other RNA
aattttaaatactcacatttttaagtagac

SEQ ID NO: 3269 - RNA, 31 nt, synthetic construct
  source 1..31: mol_type = other RNA
aaattttaaatactcacatttttaagaagac

SEQ ID NO: 3270 - RNA, 31 nt, synthetic construct
  source 1..31: mol_type = other RNA
aaattttaaatactcacatttttaagcaaac

SEQ ID NO: 3271 - RNA, 31 nt, synthetic construct
  source 1..31: mol_type = other RNA
aaattttaaatactcacatttttaaggagac

SEQ ID NO: 3272 - RNA, 31 nt, synthetic construct
  source 1..31: mol_type = other RNA
aaattttaaatactcacatttttaagtaaac

SEQ ID NO: 3273 - RNA, 31 nt, synthetic construct
  source 1..31: mol_type = other RNA
aaattttaaatactcacatttttaagtagac

SEQ ID NO: 3274 - RNA, 32 nt, synthetic construct
  source 1..32: mol_type = other RNA
taaattttaaatactcacatttttaagaagac

SEQ ID NO: 3275 - RNA, 32 nt, synthetic construct
  source 1..32: mol_type = other RNA
taaattttaaatactcacatttttaagcaaac

SEQ ID NO: 3276 - RNA, 32 nt, synthetic construct
  source 1..32: mol_type = other RNA
taaattttaaatactcacatttttaaggagac

SEQ ID NO: 3277 - RNA, 32 nt, synthetic construct
  source 1..32: mol_type = other RNA
taaattttaaatactcacatttttaagtaaac

SEQ ID NO: 3278 - RNA, 32 nt, synthetic construct
  source 1..32: mol_type = other RNA
taaattttaaatactcacatttttaagtagac

SEQ ID NO: 3279 - RNA, 33 nt, synthetic construct
  source 1..33: mol_type = other RNA
ataaattttaaatactcacatttttaagaagac

SEQ ID NO: 3280 - RNA, 33 nt, synthetic construct
  source 1..33: mol_type = other RNA
ataaattttaaatactcacatttttaagcaaac

SEQ ID NO: 3281 - RNA, 33 nt, synthetic construct
  source 1..33: mol_type = other RNA
ataaattttaaatactcacatttttaaggagac

SEQ ID NO: 3282 - RNA, 33 nt, synthetic construct
  source 1..33: mol_type = other RNA
ataaattttaaatactcacatttttaagtaaac

SEQ ID NO: 3283 - RNA, 33 nt, synthetic construct
  source 1..33: mol_type = other RNA
ataaattttaaatactcacatttttaagtagac

SEQ ID NO: 3284 - RNA, 34 nt, synthetic construct
  source 1..34: mol_type = other RNA
gataaattttaaatactcacatttttaagaagac

SEQ ID NO: 3285 - RNA, 34 nt, synthetic construct
  source 1..34: mol_type = other RNA
gataaattttaaatactcacatttttaagcaaac

SEQ ID NO: 3286 - RNA, 34 nt, synthetic construct
  source 1..34: mol_type = other RNA
gataaattttaaatactcacatttttaaggagac

SEQ ID NO: 3287 - RNA, 34 nt, synthetic construct
  source 1..34: mol_type = other RNA
gataaattttaaatactcacatttttaagtaaac

SEQ ID NO: 3288 - RNA, 34 nt, synthetic construct
  source 1..34: mol_type = other RNA
gataaattttaaatactcacatttttaagtagac

SEQ ID NO: 3289 - RNA, 35 nt, synthetic construct
  source 1..35: mol_type = other RNA
tgataaattttaaatactcacatttttaagaagac

SEQ ID NO: 3290 - RNA, 35 nt, synthetic construct
  source 1..35: mol_type = other RNA
tgataaattttaaatactcacatttttaagcaaac

SEQ ID NO: 3291 - RNA, 35 nt, synthetic construct
  source 1..35: mol_type = other RNA
tgataaattttaaatactcacatttttaaggagac

SEQ ID NO: 3292 - RNA, 35 nt, synthetic construct
  source 1..35: mol_type = other RNA
tgataaattttaaatactcacatttttaagtaaac

SEQ ID NO: 3293 - RNA, 35 nt, synthetic construct
  source 1..35: mol_type = other RNA
tgataaattttaaatactcacatttttaagtagac

SEQ ID NO: 3294 - RNA, 36 nt, synthetic construct
  source 1..36: mol_type = other RNA
gtgataaattttaaatactcacatttttaagaagac

SEQ ID NO: 3295 - RNA, 36 nt, synthetic construct
  source 1..36: mol_type = other RNA
gtgataaattttaaatactcacatttttaagcaaac

SEQ ID NO: 3296 - RNA, 36 nt, synthetic construct
  source 1..36: mol_type = other RNA
gtgataaattttaaatactcacatttttaaggagac

SEQ ID NO: 3297 - RNA, 36 nt, synthetic construct
  source 1..36: mol_type = other RNA
gtgataaattttaaatactcacatttttaagtaaac

SEQ ID NO: 3298 - RNA, 36 nt, synthetic construct
  source 1..36: mol_type = other RNA
gtgataaattttaaatactcacatttttaagtagac

SEQ ID NO: 3299 - RNA, 37 nt, synthetic construct
  source 1..37: mol_type = other RNA
agtgataaattttaaatactcacatttttaagaagac

SEQ ID NO: 3300 - RNA, 37 nt, synthetic construct
  source 1..37: mol_type = other RNA
agtgataaattttaaatactcacatttttaagcaaac

SEQ ID NO: 3301 - RNA, 37 nt, synthetic construct
  source 1..37: mol_type = other RNA
agtgataaattttaaatactcacatttttaaggagac

SEQ ID NO: 3302 - RNA, 37 nt, synthetic construct
  source 1..37: mol_type = other RNA
agtgataaattttaaatactcacatttttaagtaaac

SEQ ID NO: 3303 - RNA, 37 nt, synthetic construct
  source 1..37: mol_type = other RNA
agtgataaattttaaatactcacatttttaagtagac

SEQ ID NO: 3304 - RNA, 38 nt, synthetic construct
  source 1..38: mol_type = other RNA
aagtgataaattttaaatactcacatttttaagaagac

SEQ ID NO: 3305 - RNA, 38 nt, synthetic construct
  source 1..38: mol_type = other RNA
aagtgataaattttaaatactcacatttttaagcaaac

SEQ ID NO: 3306 - RNA, 38 nt, synthetic construct
  source 1..38: mol_type = other RNA
aagtgataaattttaaatactcacatttttaaggagac

SEQ ID NO: 3307 - RNA, 38 nt, synthetic construct
  source 1..38: mol_type = other RNA
aagtgataaattttaaatactcacatttttaagtaaac

SEQ ID NO: 3308 - RNA, 38 nt, synthetic construct
  source 1..38: mol_type = other RNA
aagtgataaattttaaatactcacatttttaagtagac

SEQ ID NO: 3309 - RNA, 39 nt, synthetic construct
  source 1..39: mol_type = other RNA
aaagtgataaattttaaatactcacatttttaagaagac

SEQ ID NO: 3310 - RNA, 39 nt, synthetic construct
  source 1..39: mol_type = other RNA
aaagtgataaattttaaatactcacatttttaagcaaac

SEQ ID NO: 3311 - RNA, 39 nt, synthetic construct
  source 1..39: mol_type = other RNA
aaagtgataaattttaaatactcacatttttaaggagac

SEQ ID NO: 3312 - RNA, 39 nt, synthetic construct
  source 1..39: mol_type = other RNA
aaagtgataaattttaaatactcacatttttaagtaaac

SEQ ID NO: 3313 - RNA, 39 nt, synthetic construct
  source 1..39: mol_type = other RNA
aaagtgataaattttaaatactcacatttttaagtagac

SEQ ID NO: 3314 - RNA, 40 nt, synthetic construct
  source 1..40: mol_type = other RNA
aaaagtgataaattttaaatactcacatttttaagaagac

SEQ ID NO: 3315 - RNA, 40 nt, synthetic construct
  source 1..40: mol_type = other RNA
aaaagtgataaattttaaatactcacatttttaagcaaac

SEQ ID NO: 3316 - RNA, 40 nt, synthetic construct
  source 1..40: mol_type = other RNA
aaaagtgataaattttaaatactcacatttttaaggagac

SEQ ID NO: 3317 - RNA, 40 nt, synthetic construct
  source 1..40: mol_type = other RNA
aaaagtgataaattttaaatactcacatttttaagtaaac

SEQ ID NO: 3318 - RNA, 40 nt, synthetic construct
  source 1..40: mol_type = other RNA
aaaagtgataaattttaaatactcacatttttaagtagac

SEQ ID NO: 3319 - RNA, 20 nt, synthetic construct
  source 1..20: mol_type = other RNA
ctcacatttttaagaagacc

SEQ ID NO: 3320 - RNA, 20 nt, synthetic construct
  source 1..20: mol_type = other RNA
ctcacatttttaaggagacc

SEQ ID NO: 3321 - RNA, 20 nt, synthetic construct
  source 1..20: mol_type = other RNA
ctcacatttttaagtaaacc

SEQ ID NO: 3322 - RNA, 20 nt, synthetic construct
  source 1..20: mol_type = other RNA
ctcacatttttaagtagacc

SEQ ID NO: 3323 - RNA, 20 nt, synthetic construct
  source 1..20: mol_type = other RNA
tcacatttttaagaagacca

SEQ ID NO: 3324 - RNA, 20 nt, synthetic construct
  source 1..20: mol_type = other RNA
tcacatttttaaggagacca

SEQ ID NO: 3325 - RNA, 20 nt, synthetic construct
  source 1..20: mol_type = other RNA
tcacatttttaagtaaacca

SEQ ID NO: 3326 - RNA, 20 nt, synthetic construct
  source 1..20: mol_type = other RNA
tcacatttttaagtagacca

SEQ ID NO: 3327 - RNA, 17 nt, synthetic construct
  source 1..17: mol_type = other RNA
cctggtttgcttaaaaa

SEQ ID NO: 3328 - RNA, 18 nt, synthetic construct
  source 1..18: mol_type = other RNA
tcctggtttgcttaaaaa

SEQ ID NO: 3329 - RNA, 19 nt, synthetic construct
  source 1..19: mol_type = other RNA
atcctggtttgcttaaaaa

SEQ ID NO: 3330 - RNA, 21 nt, synthetic construct
  source 1..21: mol_type = other RNA
ctatcctggtttgcttaaaaa

SEQ ID NO: 3331 - RNA, 22 nt, synthetic construct
  source 1..22: mol_type = other RNA
actatcctggtttgcttaaaaa

SEQ ID NO: 3332-3336 - skipped (5 entries)

SEQ ID NO: 3337 - RNA, 10 nt, synthetic construct
  source 1..10: mol_type = other RNA
ttaagcaaac

SEQ ID NO: 3338 - RNA, 11 nt, synthetic construct
  source 1..11: mol_type = other RNA
ttaagcaaacc

SEQ ID NO: 3339 - RNA, 12 nt, synthetic construct
  source 1..12: mol_type = other RNA
ttaagcaaacca

SEQ ID NO: 3340 - RNA, 13 nt, synthetic construct
  source 1..13: mol_type = other RNA
ttaagcaaaccag

SEQ ID NO: 3341 - RNA, 14 nt, synthetic construct
  source 1..14: mol_type = other RNA
ttaagcaaaccagg

SEQ ID NO: 3342 - RNA, 15 nt, synthetic construct
  source 1..15: mol_type = other RNA
ttaagcaaaccagga

SEQ ID NO: 3343 - RNA, 16 nt, synthetic construct
  source 1..16: mol_type = other RNA
ttaagcaaaccaggat

SEQ ID NO: 3344 - RNA, 17 nt, synthetic construct
  source 1..17: mol_type = other RNA
ttaagcaaaccaggata

SEQ ID NO: 3345 - RNA, 18 nt, synthetic construct
  source 1..18: mol_type = other RNA
ttaagcaaaccaggatag

SEQ ID NO: 3346 - RNA, 19 nt, synthetic construct
  source 1..19: mol_type = other RNA
ttaagcaaaccaggatagt

SEQ ID NO: 3347 - RNA, 10 nt, synthetic construct
  source 1..10: mol_type = other RNA
actcacattt

SEQ ID NO: 3348 - RNA, 11 nt, synthetic construct
  source 1..11: mol_type = other RNA
tactcacattt

SEQ ID NO: 3349 - RNA, 12 nt, synthetic construct
  source 1..12: mol_type = other RNA
atactcacattt

SEQ ID NO: 3350 - RNA, 13 nt, synthetic construct
  source 1..13: mol_type = other RNA
aatactcacattt

SEQ ID NO: 3351 - RNA, 14 nt, synthetic construct
  source 1..14: mol_type = other RNA
aaatactcacattt

SEQ ID NO: 3352 - RNA, 15 nt, synthetic construct
  source 1..15: mol_type = other RNA
taaatactcacattt

SEQ ID NO: 3353 - RNA, 16 nt, synthetic construct
  source 1..16: mol_type = other RNA
ttaaatactcacattt

SEQ ID NO: 3354 - RNA, 17 nt, synthetic construct
  source 1..17: mol_type = other RNA
tttaaatactcacattt

SEQ ID NO: 3355 - RNA, 18 nt, synthetic construct
  source 1..18: mol_type = other RNA
ttttaaatactcacattt

SEQ ID NO: 3356 - RNA, 19 nt, synthetic construct
  source 1..19: mol_type = other RNA
attttaaatactcacattt

SEQ ID NO: 3357 - RNA, 20 nt, synthetic construct
  source 1..20: mol_type = other RNA
aattttaaatactcacattt

SEQ ID NO: 3358 - RNA, 21 nt, synthetic construct
  source 1..21: mol_type = other RNA
aaattttaaatactcacattt

SEQ ID NO: 3359 - RNA, 22 nt, synthetic construct
  source 1..22: mol_type = other RNA
taaattttaaatactcacattt

SEQ ID NO: 3360 - RNA, 23 nt, synthetic construct
  source 1..23: mol_type = other RNA
ataaattttaaatactcacattt

SEQ ID NO: 3361 - RNA, 24 nt, synthetic construct
  source 1..24: mol_type = other RNA
gataaattttaaatactcacattt

SEQ ID NO: 3362 - RNA, 25 nt, synthetic construct
  source 1..25: mol_type = other RNA
tgataaattttaaatactcacattt

SEQ ID NO: 3363 - RNA, 26 nt, synthetic construct
  source 1..26: mol_type = other RNA
gtgataaattttaaatactcacattt

SEQ ID NO: 3364 - RNA, 27 nt, synthetic construct
  source 1..27: mol_type = other RNA
agtgataaattttaaatactcacattt

SEQ ID NO: 3365 - RNA, 28 nt, synthetic construct
  source 1..28: mol_type = other RNA
aagtgataaattttaaatactcacattt

SEQ ID NO: 3366 - RNA, 29 nt, synthetic construct
  source 1..29: mol_type = other RNA
aaagtgataaattttaaatactcacattt

SEQ ID NO: 3367 - RNA, 30 nt, synthetic construct
  source 1..30: mol_type = other RNA
aaaagtgataaattttaaatactcacattt

SEQ ID NO: 3368 - RNA, 31 nt, synthetic construct
  source 1..31: mol_type = other RNA
caaaagtgataaattttaaatactcacattt

SEQ ID NO: 3369 - RNA, 32 nt, synthetic construct
  source 1..32: mol_type = other RNA
tcaaaagtgataaattttaaatactcacattt

SEQ ID NO: 3370 - RNA, 33 nt, synthetic construct
  source 1..33: mol_type = other RNA
ttcaaaagtgataaattttaaatactcacattt

SEQ ID NO: 3371 - RNA, 34 nt, synthetic construct
  source 1..34: mol_type = other RNA
tttcaaaagtgataaattttaaatactcacattt

SEQ ID NO: 3372 - RNA, 35 nt, synthetic construct
  source 1..35: mol_type = other RNA
atttcaaaagtgataaattttaaatactcacattt

SEQ ID NO: 3373 - RNA, 36 nt, synthetic construct
  source 1..36: mol_type = other RNA
catttcaaaagtgataaattttaaatactcacattt

SEQ ID NO: 3374 - RNA, 37 nt, synthetic construct
  source 1..37: mol_type = other RNA
acatttcaaaagtgataaattttaaatactcacattt

SEQ ID NO: 3375 - RNA, 38 nt, synthetic construct
  source 1..38: mol_type = other RNA
aacatttcaaaagtgataaattttaaatactcacattt

SEQ ID NO: 3376 - RNA, 39 nt, synthetic construct
  source 1..39: mol_type = other RNA
aaacatttcaaaagtgataaattttaaatactcacattt

SEQ ID NO: 3377 - RNA, 40 nt, synthetic construct
  source 1..40: mol_type = other RNA
taaacatttcaaaagtgataaattttaaatactcacattt

SEQ ID NO: 3378 - RNA, 17 nt, synthetic construct
  source 1..17: mol_type = other RNA
gcattaaacatttcaaa

SEQ ID NO: 3379 - RNA, 18 nt, synthetic construct
  source 1..18: mol_type = other RNA
agcattaaacatttcaaa

SEQ ID NO: 3380 - RNA, 19 nt, synthetic construct
  source 1..19: mol_type = other RNA
cagcattaaacatttcaaa

SEQ ID NO: 3381 - RNA, 21 nt, synthetic construct
  source 1..21: mol_type = other RNA
ttcagcattaaacatttcaaa

SEQ ID NO: 3382 - RNA, 22 nt, synthetic construct
  source 1..22: mol_type = other RNA
attcagcattaaacatttcaaa

SEQ ID NO: 3383-3387 - skipped (5 entries)

SEQ ID NO: 3388 - RNA, 10 nt, synthetic construct
  source 1..10: mol_type = other RNA
gaaatgttta

SEQ ID NO: 3389 - RNA, 11 nt, synthetic construct
  source 1..11: mol_type = other RNA
gaaatgtttaa

SEQ ID NO: 3390 - RNA, 12 nt, synthetic construct
  source 1..12: mol_type = other RNA
gaaatgtttaat

SEQ ID NO: 3391 - RNA, 13 nt, synthetic construct
  source 1..13: mol_type = other RNA
gaaatgtttaatg

SEQ ID NO: 3392 - RNA, 14 nt, synthetic construct
  source 1..14: mol_type = other RNA
gaaatgtttaatgc

SEQ ID NO: 3393 - RNA, 15 nt, synthetic construct
  source 1..15: mol_type = other RNA
gaaatgtttaatgct

SEQ ID NO: 3394 - RNA, 16 nt, synthetic construct
  source 1..16: mol_type = other RNA
gaaatgtttaatgctg

SEQ ID NO: 3395 - RNA, 17 nt, synthetic construct
  source 1..17: mol_type = other RNA
gaaatgtttaatgctga

SEQ ID NO: 3396 - RNA, 18 nt, synthetic construct
  source 1..18: mol_type = other RNA
gaaatgtttaatgctgaa

SEQ ID NO: 3397 - RNA, 19 nt, synthetic construct
  source 1..19: mol_type = other RNA
gaaatgtttaatgctgaat

SEQ ID NO: 3398 - RNA, 23 nt, synthetic construct
  source 1..23: mol_type = other RNA
agtatttaaaatttatcactttt

SEQ ID NO: 3399 - RNA, 24 nt, synthetic construct
  source 1..24: mol_type = other RNA
gagtatttaaaatttatcactttt

SEQ ID NO: 3400 - RNA, 25 nt, synthetic construct
  source 1..25: mol_type = other RNA
tgagtatttaaaatttatcactttt

SEQ ID NO: 3401 - RNA, 26 nt, synthetic construct
  source 1..26: mol_type = other RNA
gtgagtatttaaaatttatcactttt

SEQ ID NO: 3402 - RNA, 27 nt, synthetic construct
  source 1..27: mol_type = other RNA
tgtgagtatttaaaatttatcactttt

SEQ ID NO: 3403 - RNA, 28 nt, synthetic construct
  source 1..28: mol_type = other RNA
atgtgagtatttaaaatttatcactttt

SEQ ID NO: 3404 - RNA, 29 nt, synthetic construct
  source 1..29: mol_type = other RNA
aatgtgagtatttaaaatttatcactttt

SEQ ID NO: 3405 - RNA, 30 nt, synthetic construct
  source 1..30: mol_type = other RNA
aaatgtgagtatttaaaatttatcactttt

SEQ ID NO: 3406 - RNA, 31 nt, synthetic construct
  source 1..31: mol_type = other RNA
aaaatgtgagtatttaaaatttatcactttt

SEQ ID NO: 3407 - RNA, 32 nt, synthetic construct
  source 1..32: mol_type = other RNA
aaaaatgtgagtatttaaaatttatcactttt

SEQ ID NO: 3408 - RNA, 33 nt, synthetic construct
  source 1..33: mol_type = other RNA
taaaaatgtgagtatttaaaatttatcactttt

SEQ ID NO: 3409 - RNA, 34 nt, synthetic construct
  source 1..34: mol_type = other RNA
ttaaaaatgtgagtatttaaaatttatcactttt

SEQ ID NO: 3410 - RNA, 35 nt, synthetic construct
  source 1..35: mol_type = other RNA
cttaaaaatgtgagtatttaaaatttatcactttt

SEQ ID NO: 3411 - RNA, 36 nt, synthetic construct
  source 1..36: mol_type = other RNA
gcttaaaaatgtgagtatttaaaatttatcactttt

SEQ ID NO: 3412 - RNA, 37 nt, synthetic construct
  source 1..37: mol_type = other RNA
tgcttaaaaatgtgagtatttaaaatttatcactttt

SEQ ID NO: 3413 - RNA, 38 nt, synthetic construct
  source 1..38: mol_type = other RNA
ttgcttaaaaatgtgagtatttaaaatttatcactttt

SEQ ID NO: 3414 - RNA, 39 nt, synthetic construct
  source 1..39: mol_type = other RNA
tttgcttaaaaatgtgagtatttaaaatttatcactttt

SEQ ID NO: 3415 - RNA, 40 nt, synthetic construct
  source 1..40: mol_type = other RNA
gtttgcttaaaaatgtgagtatttaaaatttatcactttt

SEQ ID NO: 3416 - RNA, 17 nt, synthetic construct
  source 1..17: mol_type = other RNA
tggtttgcttaaaaatg

SEQ ID NO: 3417 - RNA, 18 nt, synthetic construct
  source 1..18: mol_type = other RNA
ctggtttgcttaaaaatg

SEQ ID NO: 3418 - RNA, 19 nt, synthetic construct
  source 1..19: mol_type = other RNA
cctggtttgcttaaaaatg

SEQ ID NO: 3419 - RNA, 21 nt, synthetic construct
  source 1..21: mol_type = other RNA
atcctggtttgcttaaaaatg

SEQ ID NO: 3420 - RNA, 22 nt, synthetic construct
  source 1..22: mol_type = other RNA
tatcctggtttgcttaaaaatg

SEQ ID NO: 3421-3425 - skipped (5 entries)

SEQ ID NO: 3426 - RNA, 10 nt, synthetic construct
  source 1..10: mol_type = other RNA
ttttaagcaa

SEQ ID NO: 3427 - RNA, 11 nt, synthetic construct
  source 1..11: mol_type = other RNA
ttttaagcaaa

SEQ ID NO: 3428 - RNA, 12 nt, synthetic construct
  source 1..12: mol_type = other RNA
ttttaagcaaac

SEQ ID NO: 3429 - RNA, 13 nt, synthetic construct
  source 1..13: mol_type = other RNA
ttttaagcaaacc

SEQ ID NO: 3430 - RNA, 14 nt, synthetic construct
  source 1..14: mol_type = other RNA
ttttaagcaaacca

SEQ ID NO: 3431 - RNA, 15 nt, synthetic construct
  source 1..15: mol_type = other RNA
ttttaagcaaaccag

SEQ ID NO: 3432 - RNA, 16 nt, synthetic construct
  source 1..16: mol_type = other RNA
ttttaagcaaaccagg

SEQ ID NO: 3433 - RNA, 17 nt, synthetic construct
  source 1..17: mol_type = other RNA
ttttaagcaaaccagga

SEQ ID NO: 3434 - RNA, 18 nt, synthetic construct
  source 1..18: mol_type = other RNA
ttttaagcaaaccaggat

SEQ ID NO: 3435 - RNA, 19 nt, synthetic construct
  source 1..19: mol_type = other RNA
ttttaagcaaaccaggata

SEQ ID NO: 3436 - RNA, 10 nt, synthetic construct
  source 1..10: mol_type = other RNA
atactcacat

SEQ ID NO: 3437 - RNA, 11 nt, synthetic construct
  source 1..11: mol_type = other RNA
aatactcacat

SEQ ID NO: 3438 - RNA, 12 nt, synthetic construct
  source 1..12: mol_type = other RNA
aaatactcacat

SEQ ID NO: 3439 - RNA, 13 nt, synthetic construct
  source 1..13: mol_type = other RNA
taaatactcacat

SEQ ID NO: 3440 - RNA, 14 nt, synthetic construct
  source 1..14: mol_type = other RNA
ttaaatactcacat

SEQ ID NO: 3441 - RNA, 15 nt, synthetic construct
  source 1..15: mol_type = other RNA
tttaaatactcacat

SEQ ID NO: 3442 - RNA, 16 nt, synthetic construct
  source 1..16: mol_type = other RNA
ttttaaatactcacat

SEQ ID NO: 3443 - RNA, 17 nt, synthetic construct
  source 1..17: mol_type = other RNA
attttaaatactcacat

SEQ ID NO: 3444 - RNA, 18 nt, synthetic construct
  source 1..18: mol_type = other RNA
aattttaaatactcacat

SEQ ID NO: 3445 - RNA, 19 nt, synthetic construct
  source 1..19: mol_type = other RNA
aaattttaaatactcacat

SEQ ID NO: 3446 - RNA, 20 nt, synthetic construct
  source 1..20: mol_type = other RNA
taaattttaaatactcacat

SEQ ID NO: 3447 - RNA, 21 nt, synthetic construct
  source 1..21: mol_type = other RNA
ataaattttaaatactcacat

SEQ ID NO: 3448 - RNA, 22 nt, synthetic construct
  source 1..22: mol_type = other RNA
gataaattttaaatactcacat

SEQ ID NO: 3449 - RNA, 23 nt, synthetic construct
  source 1..23: mol_type = other RNA
tgataaattttaaatactcacat

SEQ ID NO: 3450 - RNA, 24 nt, synthetic construct
  source 1..24: mol_type = other RNA
gtgataaattttaaatactcacat

SEQ ID NO: 3451 - RNA, 25 nt, synthetic construct
  source 1..25: mol_type = other RNA
agtgataaattttaaatactcacat

SEQ ID NO: 3452 - RNA, 26 nt, synthetic construct
  source 1..26: mol_type = other RNA
aagtgataaattttaaatactcacat

SEQ ID NO: 3453 - RNA, 27 nt, synthetic construct
  source 1..27: mol_type = other RNA
aaagtgataaattttaaatactcacat

SEQ ID NO: 3454 - RNA, 28 nt, synthetic construct
  source 1..28: mol_type = other RNA
aaaagtgataaattttaaatactcacat

SEQ ID NO: 3455 - RNA, 29 nt, synthetic construct
  source 1..29: mol_type = other RNA
caaaagtgataaattttaaatactcacat

SEQ ID NO: 3456 - RNA, 30 nt, synthetic construct
  source 1..30: mol_type = other RNA
tcaaaagtgataaattttaaatactcacat

SEQ ID NO: 3457 - RNA, 31 nt, synthetic construct
  source 1..31: mol_type = other RNA
ttcaaaagtgataaattttaaatactcacat

SEQ ID NO: 3458 - RNA, 32 nt, synthetic construct
  source 1..32: mol_type = other RNA
tttcaaaagtgataaattttaaatactcacat

SEQ ID NO: 3459 - RNA, 33 nt, synthetic construct
  source 1..33: mol_type = other RNA
atttcaaaagtgataaattttaaatactcacat

SEQ ID NO: 3460 - RNA, 34 nt, synthetic construct
  source 1..34: mol_type = other RNA
catttcaaaagtgataaattttaaatactcacat

SEQ ID NO: 3461 - RNA, 35 nt, synthetic construct
  source 1..35: mol_type = other RNA
acatttcaaaagtgataaattttaaatactcacat

SEQ ID NO: 3462 - RNA, 36 nt, synthetic construct
  source 1..36: mol_type = other RNA
aacatttcaaaagtgataaattttaaatactcacat

SEQ ID NO: 3463 - RNA, 37 nt, synthetic construct
  source 1..37: mol_type = other RNA
aaacatttcaaaagtgataaattttaaatactcacat

SEQ ID NO: 3464 - RNA, 38 nt, synthetic construct
  source 1..38: mol_type = other RNA
taaacatttcaaaagtgataaattttaaatactcacat

SEQ ID NO: 3465 - RNA, 39 nt, synthetic construct
  source 1..39: mol_type = other RNA
ttaaacatttcaaaagtgataaattttaaatactcacat

SEQ ID NO: 3466 - RNA, 40 nt, synthetic construct
  source 1..40: mol_type = other RNA
attaaacatttcaaaagtgataaattttaaatactcacat

SEQ ID NO: 3467 - RNA, 17 nt, synthetic construct
  source 1..17: mol_type = other RNA
acctatagattactatc

SEQ ID NO: 3468 - RNA, 18 nt, synthetic construct
  source 1..18: mol_type = other RNA
cacctatagattactatc

SEQ ID NO: 3469 - RNA, 19 nt, synthetic construct
  source 1..19: mol_type = other RNA
gcacctatagattactatc

SEQ ID NO: 3470 - RNA, 20 nt, synthetic construct
  source 1..20: mol_type = other RNA
tgcacctatagattactatc

SEQ ID NO: 3471 - RNA, 21 nt, synthetic construct
  source 1..21: mol_type = other RNA
atgcacctatagattactatc

SEQ ID NO: 3472 - RNA, 22 nt, synthetic construct
  source 1..22: mol_type = other RNA
tatgcacctatagattactatc

SEQ ID NO: 3473-3477 - skipped (5 entries)

SEQ ID NO: 3478 - RNA, 10 nt, synthetic construct
  source 1..10: mol_type = other RNA
agtaatctat

SEQ ID NO: 3479 - RNA, 11 nt, synthetic construct
  source 1..11: mol_type = other RNA
agtaatctata

SEQ ID NO: 3480 - RNA, 12 nt, synthetic construct
  source 1..12: mol_type = other RNA
agtaatctatag

SEQ ID NO: 3481 - RNA, 13 nt, synthetic construct
  source 1..13: mol_type = other RNA
agtaatctatagg

SEQ ID NO: 3482 - RNA, 14 nt, synthetic construct
  source 1..14: mol_type = other RNA
agtaatctataggt

SEQ ID NO: 3483 - RNA, 15 nt, synthetic construct
  source 1..15: mol_type = other RNA
agtaatctataggtg

SEQ ID NO: 3484 - RNA, 16 nt, synthetic construct
  source 1..16: mol_type = other RNA
agtaatctataggtgc

SEQ ID NO: 3485 - RNA, 17 nt, synthetic construct
  source 1..17: mol_type = other RNA
agtaatctataggtgca

SEQ ID NO: 3486 - RNA, 18 nt, synthetic construct
  source 1..18: mol_type = other RNA
agtaatctataggtgcat

SEQ ID NO: 3487 - RNA, 19 nt, synthetic construct
  source 1..19: mol_type = other RNA
agtaatctataggtgcata

SEQ ID NO: 3488 - RNA, 24 nt, synthetic construct
  source 1..24: mol_type = other RNA
tcacatttttaagcaaaccaggat

SEQ ID NO: 3489 - RNA, 25 nt, synthetic construct
  source 1..25: mol_type = other RNA
ctcacatttttaagcaaaccaggat

SEQ ID NO: 3490 - RNA, 26 nt, synthetic construct
  source 1..26: mol_type = other RNA
actcacatttttaagcaaaccaggat

SEQ ID NO: 3491 - RNA, 27 nt, synthetic construct
  source 1..27: mol_type = other RNA
tactcacatttttaagcaaaccaggat

SEQ ID NO: 3492 - RNA, 28 nt, synthetic construct
  source 1..28: mol_type = other RNA
atactcacatttttaagcaaaccaggat

SEQ ID NO: 3493 - RNA, 29 nt, synthetic construct
  source 1..29: mol_type = other RNA
aatactcacatttttaagcaaaccaggat

SEQ ID NO: 3494 - RNA, 30 nt, synthetic construct
  source 1..30: mol_type = other RNA
aaatactcacatttttaagcaaaccaggat

SEQ ID NO: 3495 - RNA, 31 nt, synthetic construct
  source 1..31: mol_type = other RNA
taaatactcacatttttaagcaaaccaggat

SEQ ID NO: 3496 - RNA, 32 nt, synthetic construct
  source 1..32: mol_type = other RNA
ttaaatactcacatttttaagcaaaccaggat

SEQ ID NO: 3497 - RNA, 33 nt, synthetic construct
  source 1..33: mol_type = other RNA
tttaaatactcacatttttaagcaaaccaggat

SEQ ID NO: 3498 - RNA, 34 nt, synthetic construct
  source 1..34: mol_type = other RNA
ttttaaatactcacatttttaagcaaaccaggat

SEQ ID NO: 3499 - RNA, 35 nt, synthetic construct
  source 1..35: mol_type = other RNA
attttaaatactcacatttttaagcaaaccaggat

SEQ ID NO: 3500 - RNA, 36 nt, synthetic construct
  source 1..36: mol_type = other RNA
aattttaaatactcacatttttaagcaaaccaggat

SEQ ID NO: 3501 - RNA, 37 nt, synthetic construct
  source 1..37: mol_type = other RNA
aaattttaaatactcacatttttaagcaaaccaggat

SEQ ID NO: 3502 - RNA, 38 nt, synthetic construct
  source 1..38: mol_type = other RNA
taaattttaaatactcacatttttaagcaaaccaggat

SEQ ID NO: 3503 - RNA, 39 nt, synthetic construct
  source 1..39: mol_type = other RNA
ataaattttaaatactcacatttttaagcaaaccaggat

SEQ ID NO: 3504 - RNA, 40 nt, synthetic construct
  source 1..40: mol_type = other RNA
gataaattttaaatactcacatttttaagcaaaccaggat

SEQ ID NO: 3505 - RNA, 20 nt, synthetic construct
  source 1..20: mol_type = other RNA
aaagttaaacatctcttctg

SEQ ID NO: 3506 - RNA, 20 nt, synthetic construct
  source 1..20: mol_type = other RNA
agaaaagttaaacatctctt

SEQ ID NO: 3507 - RNA, 20 nt, synthetic construct
  source 1..20: mol_type = other RNA
tccatttactctttttgctg

SEQ ID NO: 3508 - RNA, 17 nt, synthetic construct
  source 1..17: mol_type = other RNA
agcattaaacatttcaa

SEQ ID NO: 3509 - RNA, 18 nt, synthetic construct
  source 1..18: mol_type = other RNA
cagcattaaacatttcaa

SEQ ID NO: 3510 - RNA, 19 nt, synthetic construct
  source 1..19: mol_type = other RNA
tcagcattaaacatttcaa

SEQ ID NO: 3511 - RNA, 21 nt, synthetic construct
  source 1..21: mol_type = other RNA
attcagcattaaacatttcaa

SEQ ID NO: 3512 - RNA, 22 nt, synthetic construct
  source 1..22: mol_type = other RNA
cattcagcattaaacatttcaa

SEQ ID NO: 3513-3517 - skipped (5 entries)

SEQ ID NO: 3518 - RNA, 10 nt, synthetic construct
  source 1..10: mol_type = other RNA
aaatgtttaa

SEQ ID NO: 3519 - RNA, 11 nt, synthetic construct
  source 1..11: mol_type = other RNA
aaatgtttaat

SEQ ID NO: 3520 - RNA, 12 nt, synthetic construct
  source 1..12: mol_type = other RNA
aaatgtttaatg

SEQ ID NO: 3521 - RNA, 13 nt, synthetic construct
  source 1..13: mol_type = other RNA
aaatgtttaatgc

SEQ ID NO: 3522 - RNA, 14 nt, synthetic construct
  source 1..14: mol_type = other RNA
aaatgtttaatgct

SEQ ID NO: 3523 - RNA, 15 nt, synthetic construct
  source 1..15: mol_type = other RNA
aaatgtttaatgctg

SEQ ID NO: 3524 - RNA, 16 nt, synthetic construct
  source 1..16: mol_type = other RNA
aaatgtttaatgctga

SEQ ID NO: 3525 - RNA, 17 nt, synthetic construct
  source 1..17: mol_type = other RNA
aaatgtttaatgctgaa

SEQ ID NO: 3526 - RNA, 18 nt, synthetic construct
  source 1..18: mol_type = other RNA
aaatgtttaatgctgaat

SEQ ID NO: 3527 - RNA, 19 nt, synthetic construct
  source 1..19: mol_type = other RNA
aaatgtttaatgctgaatg

SEQ ID NO: 3528 - RNA, 24 nt, synthetic construct
  source 1..24: mol_type = other RNA
agtatttaaaatttatcacttttg

SEQ ID NO: 3529 - RNA, 25 nt, synthetic construct
  source 1..25: mol_type = other RNA
gagtatttaaaatttatcacttttg

SEQ ID NO: 3530 - RNA, 26 nt, synthetic construct
  source 1..26: mol_type = other RNA
tgagtatttaaaatttatcacttttg

SEQ ID NO: 3531 - RNA, 27 nt, synthetic construct
  source 1..27: mol_type = other RNA
gtgagtatttaaaatttatcacttttg

SEQ ID NO: 3532 - RNA, 28 nt, synthetic construct
  source 1..28: mol_type = other RNA
tgtgagtatttaaaatttatcacttttg

SEQ ID NO: 3533 - RNA, 29 nt, synthetic construct
  source 1..29: mol_type = other RNA
atgtgagtatttaaaatttatcacttttg

SEQ ID NO: 3534 - RNA, 30 nt, synthetic construct
  source 1..30: mol_type = other RNA
aatgtgagtatttaaaatttatcacttttg

SEQ ID NO: 3535 - RNA, 31 nt, synthetic construct
  source 1..31: mol_type = other RNA
aaatgtgagtatttaaaatttatcacttttg

SEQ ID NO: 3536 - RNA, 32 nt, synthetic construct
  source 1..32: mol_type = other RNA
aaaatgtgagtatttaaaatttatcacttttg

SEQ ID NO: 3537 - RNA, 33 nt, synthetic construct
  source 1..33: mol_type = other RNA
aaaaatgtgagtatttaaaatttatcacttttg

SEQ ID NO: 3538 - RNA, 34 nt, synthetic construct
  source 1..34: mol_type = other RNA
taaaaatgtgagtatttaaaatttatcacttttg

SEQ ID NO: 3539 - RNA, 35 nt, synthetic construct
  source 1..35: mol_type = other RNA
ttaaaaatgtgagtatttaaaatttatcacttttg

SEQ ID NO: 3540 - RNA, 36 nt, synthetic construct
  source 1..36: mol_type = other RNA
cttaaaaatgtgagtatttaaaatttatcacttttg

SEQ ID NO: 3541 - RNA, 37 nt, synthetic construct
  source 1..37: mol_type = other RNA
gcttaaaaatgtgagtatttaaaatttatcacttttg

SEQ ID NO: 3542 - RNA, 38 nt, synthetic construct
  source 1..38: mol_type = other RNA
tgcttaaaaatgtgagtatttaaaatttatcacttttg

SEQ ID NO: 3543 - RNA, 39 nt, synthetic construct
  source 1..39: mol_type = other RNA
ttgcttaaaaatgtgagtatttaaaatttatcacttttg

SEQ ID NO: 3544 - RNA, 40 nt, synthetic construct
  source 1..40: mol_type = other RNA
tttgcttaaaaatgtgagtatttaaaatttatcacttttg

SEQ ID NO: 3545 - RNA, 20 nt, synthetic construct
  source 1..20: mol_type = other RNA
agaagttgctcttttcactc

SEQ ID NO: 3546 - RNA, 20 nt, synthetic construct
  source 1..20: mol_type = other RNA
agcactcagatttgataaag

SEQ ID NO: 3547 - RNA, 20 nt, synthetic construct
  source 1..20: mol_type = other RNA
tctcatatactttcagcact

SEQ ID NO: 3548 - RNA, 20 nt, synthetic construct
  source 1..20: mol_type = other RNA
tgtattatctcatatacttt

SEQ ID NO: 3549 - RNA, 20 nt, synthetic construct
  source 1..20: mol_type = other RNA
ttcagcactcagatttgata

SEQ ID NO: 3550 - RNA, 25 nt, synthetic construct
  source 1..25: mol_type = other RNA
gagtatttaaaatttatcattgttg

SEQ ID NO: 3551 - RNA, 26 nt, synthetic construct
  source 1..26: mol_type = other RNA
tgagtatttaaaatttatcattgttg

SEQ ID NO: 3552 - RNA, 27 nt, synthetic construct
  source 1..27: mol_type = other RNA
gtgagtatttaaaatttatcattgttg

SEQ ID NO: 3553 - RNA, 28 nt, synthetic construct
  source 1..28: mol_type = other RNA
tgtgagtatttaaaatttatcattgttg

SEQ ID NO: 3554 - RNA, 29 nt, synthetic construct
  source 1..29: mol_type = other RNA
atgtgagtatttaaaatttatcattgttg

SEQ ID NO: 3555 - RNA, 30 nt, synthetic construct
  source 1..30: mol_type = other RNA
aatgtgagtatttaaaatttatcattgttg

SEQ ID NO: 3556 - RNA, 31 nt, synthetic construct
  source 1..31: mol_type = other RNA
aaatgtgagtatttaaaatttatcattgttg

SEQ ID NO: 3557 - RNA, 32 nt, synthetic construct
  source 1..32: mol_type = other RNA
aaaatgtgagtatttaaaatttatcattgttg

SEQ ID NO: 3558 - RNA, 33 nt, synthetic construct
  source 1..33: mol_type = other RNA
aaaaatgtgagtatttaaaatttatcattgttg

SEQ ID NO: 3559 - RNA, 34 nt, synthetic construct
  source 1..34: mol_type = other RNA
taaaaatgtgagtatttaaaatttatcattgttg

SEQ ID NO: 3560 - RNA, 35 nt, synthetic construct
  source 1..35: mol_type = other RNA
ttaaaaatgtgagtatttaaaatttatcattgttg

SEQ ID NO: 3561 - RNA, 36 nt, synthetic construct
  source 1..36: mol_type = other RNA
cttaaaaatgtgagtatttaaaatttatcattgttg

SEQ ID NO: 3562 - RNA, 37 nt, synthetic construct
  source 1..37: mol_type = other RNA
gcttaaaaatgtgagtatttaaaatttatcattgttg

SEQ ID NO: 3563 - RNA, 38 nt, synthetic construct
  source 1..38: mol_type = other RNA
tgcttaaaaatgtgagtatttaaaatttatcattgttg

SEQ ID NO: 3564 - RNA, 39 nt, synthetic construct
  source 1..39: mol_type = other RNA
ttgcttaaaaatgtgagtatttaaaatttatcattgttg

SEQ ID NO: 3565 - RNA, 40 nt, synthetic construct
  source 1..40: mol_type = other RNA
tttgcttaaaaatgtgagtatttaaaatttatcattgttg

SEQ ID NO: 3566 - RNA, 96 nt, synthetic construct
  source 1..96: mol_type = other RNA
gcacctatagattactatccgttttagagctagaaatagcaagttaaaataaggctagtccgttatcaacttgaaaaagtggcaccgagtcggtgc

SEQ ID NO: 3567 - RNA, 96 nt, synthetic construct
  source 1..96: mol_type = other RNA
ctcttttcactcaaggtcttgttttagagctagaaatagcaagttaaaataaggctagtccgttatcaacttgaaaaagtggcaccgagtcggtgc

SEQ ID NO: 3568 - RNA, 96 nt, synthetic construct
  source 1..96: mol_type = other RNA
gaagttgctcttttcactcagttttagagctagaaatagcaagttaaaataaggctagtccgttatcaacttgaaaaagtggcaccgagtcggtgc

SEQ ID NO: 3569 - RNA, 96 nt, synthetic construct
  source 1..96: mol_type = other RNA
tcctggtttgcttaaaaatggttttagagctagaaatagcaagttaaaataaggctagtccgttatcaacttgaaaaagtggcaccgagtcggtgc

SEQ ID NO: 3570 - RNA, 96 nt, synthetic construct
  source 1..96: mol_type = other RNA
ggtcttgggtatgcacctatgttttagagctagaaatagcaagttaaaataaggctagtccgttatcaacttgaaaaagtggcaccgagtcggtgc

SEQ ID NO: 3571 - RNA, 96 nt, synthetic construct
  source 1..96: mol_type = other RNA
agcattaaacatttcaaaaggttttagagctagaaatagcaagttaaaataaggctagtccgttatcaacttgaaaaagtggcaccgagtcggtgc

SEQ ID NO: 3572 - RNA, 96 nt, synthetic construct
  source 1..96: mol_type = other RNA
tttccatttactctttttgcgttttagagctagaaatagcaagttaaaataaggctagtccgttatcaacttgaaaaagtggcaccgagtcggtgc

SEQ ID NO: 3573 - RNA, 96 nt, synthetic construct
  source 1..96: mol_type = other RNA
ctggtttgcttaaaaatgtggttttagagctagaaatagcaagttaaaataaggctagtccgttatcaacttgaaaaagtggcaccgagtcggtgc

SEQ ID NO: 3574 - RNA, 96 nt, synthetic construct
  source 1..96: mol_type = other RNA
cacctatagattactatcctgttttagagctagaaatagcaagttaaaataaggctagtccgttatcaacttgaaaaagtggcaccgagtcggtgc

SEQ ID NO: 3575 - RNA, 96 nt, synthetic construct
  source 1..96: mol_type = other RNA
tatagattactatcctggttgttttagagctagaaatagcaagttaaaataaggctagtccgttatcaacttgaaaaagtggcaccgagtcggtgc

SEQ ID NO: 3576 - RNA, 96 nt, synthetic construct
  source 1..96: mol_type = other RNA
tttttgctgatggcacattcgttttagagctagaaatagcaagttaaaataaggctagtccgttatcaacttgaaaaagtggcaccgagtcggtgc

SEQ ID NO: 3577 - RNA, 96 nt, synthetic construct
  source 1..96: mol_type = other RNA
tcagcattaaacatttcaaagttttagagctagaaatagcaagttaaaataaggctagtccgttatcaacttgaaaaagtggcaccgagtcggtgc

SEQ ID NO: 3578 - RNA, 100 nt, synthetic construct
  source 1..100: mol_type = other RNA
gcacctatagattactatccgttttagagctagaaatagcaagttaaaataaggctagtccgttatcaacttgaaaaagtggcaccgagtcggtgctttt

SEQ ID NO: 3579 - RNA, 100 nt, synthetic construct
  source 1..100: mol_type = other RNA
ctcttttcactcaaggtcttgttttagagctagaaatagcaagttaaaataaggctagtccgttatcaacttgaaaaagtggcaccgagtcggtgctttt

SEQ ID NO: 3580 - RNA, 100 nt, synthetic construct
  source 1..100: mol_type = other RNA
gaagttgctcttttcactcagttttagagctagaaatagcaagttaaaataaggctagtccgttatcaacttgaaaaagtggcaccgagtcggtgctttt

SEQ ID NO: 3581 - RNA, 100 nt, synthetic construct
  source 1..100: mol_type = other RNA
tcctggtttgcttaaaaatggttttagagctagaaatagcaagttaaaataaggctagtccgttatcaacttgaaaaagtggcaccgagtcggtgctttt

SEQ ID NO: 3582 - RNA, 100 nt, synthetic construct
  source 1..100: mol_type = other RNA
ggtcttgggtatgcacctatgttttagagctagaaatagcaagttaaaataaggctagtccgttatcaacttgaaaaagtggcaccgagtcggtgctttt

SEQ ID NO: 3583 - RNA, 100 nt, synthetic construct
  source 1..100: mol_type = other RNA
agcattaaacatttcaaaaggttttagagctagaaatagcaagttaaaataaggctagtccgttatcaacttgaaaaagtggcaccgagtcggtgctttt

SEQ ID NO: 3584 - RNA, 100 nt, synthetic construct
  source 1..100: mol_type = other RNA
tttccatttactctttttgcgttttagagctagaaatagcaagttaaaataaggctagtccgttatcaacttgaaaaagtggcaccgagtcggtgctttt

SEQ ID NO: 3585 - RNA, 100 nt, synthetic construct
  source 1..100: mol_type = other RNA
ctggtttgcttaaaaatgtggttttagagctagaaatagcaagttaaaataaggctagtccgttatcaacttgaaaaagtggcaccgagtcggtgctttt

SEQ ID NO: 3586 - RNA, 100 nt, synthetic construct
  source 1..100: mol_type = other RNA
cacctatagattactatcctgttttagagctagaaatagcaagttaaaataaggctagtccgttatcaacttgaaaaagtggcaccgagtcggtgctttt

SEQ ID NO: 3587 - RNA, 100 nt, synthetic construct
  source 1..100: mol_type = other RNA
tatagattactatcctggttgttttagagctagaaatagcaagttaaaataaggctagtccgttatcaacttgaaaaagtggcaccgagtcggtgctttt

SEQ ID NO: 3588 - RNA, 100 nt, synthetic construct
  source 1..100: mol_type = other RNA
tttttgctgatggcacattcgttttagagctagaaatagcaagttaaaataaggctagtccgttatcaacttgaaaaagtggcaccgagtcggtgctttt

SEQ ID NO: 3589 - RNA, 100 nt, synthetic construct
  source 1..100: mol_type = other RNA
tcagcattaaacatttcaaagttttagagctagaaatagcaagttaaaataaggctagtccgttatcaacttgaaaaagtggcaccgagtcggtgctttt

SEQ ID NO: 3590 - skipped

SEQ ID NO: 3591 - RNA, 22 nt, synthetic construct
  source 1..22: mol_type = other RNA
cgcgtctctacgtgggggcgcg

SEQ ID NO: 3592 - RNA, 164 nt, synthetic construct
  source 1..164: mol_type = other RNA
agaagctttctgtatggatcgttttagagctagaaatagcaagttaaaataaggctagtccgttatcaacttgaaaaagtggcaccgagtcggtgcttgctgggtttccaaagtggaagcttgatcccatacagaacattgacgcgtctctacgtgggggcgcg

SEQ ID NO: 3593 - RNA, 166 nt, synthetic construct
  source 1..166: mol_type = other RNA
agaagctttctgtatggatcgttttagagctagaaatagcaagttaaaataaggctagtccgttatcaacttgaaaaagtggcaccgagtcggtgcttgctgggtttccaaagtggaagcttgatcccatacagaaaacattgacgcgtctctacgtgggggcgcg

SEQ ID NO: 3594 - RNA, 166 nt, synthetic construct
  source 1..166: mol_type = other RNA
agaagctttctgtatggatcgttttagagctagaaatagcaagttaaaataaggctagtccgttatcaacttgaaaaagtggcaccgagtcggtgctcttgctgggtttccaaagtggaagcttgatcccatacagaacattgacgcgtctctacgtgggggcgcg

SEQ ID NO: 3595 - RNA, 168 nt, synthetic construct
  source 1..168: mol_type = other RNA
agaagctttctgtatggatcgttttagagctagaaatagcaagttaaaataaggctagtccgttatcaacttgaaaaagtggcaccgagtcggtgcttgctgggtttccaaagtggaagcttgatcccatacagaaagaacattgacgcgtctctacgtgggggcgcg

SEQ ID NO: 3596 - RNA, 168 nt, synthetic construct
  source 1..168: mol_type = other RNA
agaagctttctgtatggatcgttttagagctagaaatagcaagttaaaataaggctagtccgttatcaacttgaaaaagtggcaccgagtcggtgctcttgctgggtttccaaagtggaagcttgatcccatacagaaaacattgacgcgtctctacgtgggggcgcg

SEQ ID NO: 3597 - RNA, 168 nt, synthetic construct
  source 1..168: mol_type = other RNA
agaagctttctgtatggatcgttttagagctagaaatagcaagttaaaataaggctagtccgttatcaacttgaaaaagtggcaccgagtcggtgctgtcttgctgggtttccaaagtggaagcttgatcccatacagaacattgacgcgtctctacgtgggggcgcg

SEQ ID NO: 3598 - RNA, 170 nt, synthetic construct
  source 1..170: mol_type = other RNA
agaagctttctgtatggatcgttttagagctagaaatagcaagttaaaataaggctagtccgttatcaacttgaaaaagtggcaccgagtcggtgcttgctgggtttccaaagtggaagcttgatcccatacagaaagctaacattgacgcgtctctacgtgggggcgcg

SEQ ID NO: 3599 - RNA, 170 nt, synthetic construct
  source 1..170: mol_type = other RNA
agaagctttctgtatggatcgttttagagctagaaatagcaagttaaaataaggctagtccgttatcaacttgaaaaagtggcaccgagtcggtgctcttgctgggtttccaaagtggaagcttgatcccatacagaaagaacattgacgcgtctctacgtgggggcgcg

SEQ ID NO: 3600 - RNA, 170 nt, synthetic construct
  source 1..170: mol_type = other RNA
agaagctttctgtatggatcgttttagagctagaaatagcaagttaaaataaggctagtccgttatcaacttgaaaaagtggcaccgagtcggtgctgtcttgctgggtttccaaagtggaagcttgatcccatacagaaaacattgacgcgtctctacgtgggggcgcg

SEQ ID NO: 3601 - RNA, 172 nt, synthetic construct
  source 1..172: mol_type = other RNA
agaagctttctgtatggatcgttttagagctagaaatagcaagttaaaataaggctagtccgttatcaacttgaaaaagtggcaccgagtcggtgctcttgctgggtttccaaagtggaagcttgatcccatacagaaagctaacattgacgcgtctctacgtgggggcgcg

SEQ ID NO: 3602 - RNA, 172 nt, synthetic construct
  source 1..172: mol_type = other RNA
agaagctttctgtatggatcgttttagagctagaaatagcaagttaaaataaggctagtccgttatcaacttgaaaaagtggcaccgagtcggtgctgtcttgctgggtttccaaagtggaagcttgatcccatacagaaagaacattgacgcgtctctacgtgggggcgcg

SEQ ID NO: 3603 - RNA, 174 nt, synthetic construct
  source 1..174: mol_type = other RNA
agaagctttctgtatggatcgttttagagctagaaatagcaagttaaaataaggctagtccgttatcaacttgaaaaagtggcaccgagtcggtgctgtcttgctgggtttccaaagtggaagcttgatcccatacagaaagctaacattgacgcgtctctacgtgggggcgcg

SEQ ID NO: 3604 - RNA, 126 nt, synthetic construct
  source 1..126: mol_type = other RNA
gtcttgctgggtttccaaaggttttagagctagaaatagcaagttaaaataaggctagtccgttatcaacttgaaaaagtggcaccgagtcggtgcaacattgacgcgtctctacgtgggggcgcg

SEQ ID NO: 3605 - RNA, 126 nt, synthetic construct
  source 1..126: mol_type = other RNA
gtgaagacaggtgtcttgctgttttagagctagaaatagcaagttaaaataaggctagtccgttatcaacttgaaaaagtggcaccgagtcggtgcaacattgacgcgtctctacgtgggggcgcg

SEQ ID NO: 3606 - RNA, 126 nt, synthetic construct
  source 1..126: mol_type = other RNA
gaactgagccacgtgaagacgttttagagctagaaatagcaagttaaaataaggctagtccgttatcaacttgaaaaagtggcaccgagtcggtgcaacattgacgcgtctctacgtgggggcgcg

SEQ ID NO: 3607 - RNA, 126 nt, synthetic construct
  source 1..126: mol_type = other RNA
cgtgaagacaggtgtcttgcgttttagagctagaaatagcaagttaaaataaggctagtccgttatcaacttgaaaaagtggcaccgagtcggtgcaacattgacgcgtctctacgtgggggcgcg

SEQ ID NO: 3608 - RNA, 126 nt, synthetic construct
  source 1..126: mol_type = other RNA
acatcttccttaggaactccgttttagagctagaaatagcaagttaaaataaggctagtccgttatcaacttgaaaaagtggcaccgagtcggtgcaacattgacgcgtctctacgtgggggcgcg

SEQ ID NO: 3609 - RNA, 126 nt, synthetic construct
  source 1..126: mol_type = other RNA
aggcttcatacatcttccttgttttagagctagaaatagcaagttaaaataaggctagtccgttatcaacttgaaaaagtggcaccgagtcggtgcaacattgacgcgtctctacgtgggggcgcg

SEQ ID NO: 3610 - RNA, 126 nt, synthetic construct
  source 1..126: mol_type = other RNA
actacttaccatctctttcagttttagagctagaaatagcaagttaaaataaggctagtccgttatcaacttgaaaaagtggcaccgagtcggtgcaacattgacgcgtctctacgtgggggcgcg

SEQ ID NO: 3611 - RNA, 145 nt, synthetic construct
  source 1..145: mol_type = other RNA
ggatgcagaagctttctgtagttttagagctagaaatagcaagttaaaataaggctagtccgttatcaacttgaaaaagtggcaccgagtcggtgctgatcccatacagaaagctaacattgacgcgtctctacgtgggggcgcg

SEQ ID NO: 3612 - RNA, 147 nt, synthetic construct
  source 1..147: mol_type = other RNA
ggatgcagaagctttctgtagttttagagctagaaatagcaagttaaaataaggctagtccgttatcaacttgaaaaagtggcaccgagtcggtgctgatcccatacagaaagcttcaacattgacgcgtctctacgtgggggcgcg

SEQ ID NO: 3613 - RNA, 148 nt, synthetic construct
  source 1..148: mol_type = other RNA
ggatgcagaagctttctgtagttttagagctagaaatagcaagttaaaataaggctagtccgttatcaacttgaaaaagtggcaccgagtcggtgcgcctgatcccatacagaaagctaacattgacgcgtctctacgtgggggcgcg

SEQ ID NO: 3614 - RNA, 149 nt, synthetic construct
  source 1..149: mol_type = other RNA
ggatgcagaagctttctgtagttttagagctagaaatagcaagttaaaataaggctagtccgttatcaacttgaaaaagtggcaccgagtcggtgctgatcccatacagaaagcttctgaacattgacgcgtctctacgtgggggcgcg

SEQ ID NO: 3615 - RNA, 150 nt, synthetic construct
  source 1..150: mol_type = other RNA
ggatgcagaagctttctgtagttttagagctagaaatagcaagttaaaataaggctagtccgttatcaacttgaaaaagtggcaccgagtcggtgcgcctgatcccatacagaaagcttcaacattgacgcgtctctacgtgggggcgcg

SEQ ID NO: 3616 - RNA, 150 nt, synthetic construct
  source 1..150: mol_type = other RNA
ggatgcagaagctttctgtagttttagagctagaaatagcaagttaaaataaggctagtccgttatcaacttgaaaaagtggcaccgagtcggtgcaagcctgatcccatacagaaagctaacattgacgcgtctctacgtgggggcgcg

SEQ ID NO: 3617 - RNA, 151 nt, synthetic construct
  source 1..151: mol_type = other RNA
ggatgcagaagctttctgtagttttagagctagaaatagcaagttaaaataaggctagtccgttatcaacttgaaaaagtggcaccgagtcggtgctgatcccatacagaaagcttctgcaaacattgacgcgtctctacgtgggggcgcg

SEQ ID NO: 3618 - RNA, 152 nt, synthetic construct
  source 1..152: mol_type = other RNA
ggatgcagaagctttctgtagttttagagctagaaatagcaagttaaaataaggctagtccgttatcaacttgaaaaagtggcaccgagtcggtgcgcctgatcccatacagaaagcttctgaacattgacgcgtctctacgtgggggcgcg

SEQ ID NO: 3619 - RNA, 152 nt, synthetic construct
  source 1..152: mol_type = other RNA
ggatgcagaagctttctgtagttttagagctagaaatagcaagttaaaataaggctagtccgttatcaacttgaaaaagtggcaccgagtcggtgcaagcctgatcccatacagaaagcttcaacattgacgcgtctctacgtgggggcgcg

SEQ ID NO: 3620 - RNA, 152 nt, synthetic construct
  source 1..152: mol_type = other RNA
ggatgcagaagctttctgtagttttagagctagaaatagcaagttaaaataaggctagtccgttatcaacttgaaaaagtggcaccgagtcggtgcggaagcctgatcccatacagaaagctaacattgacgcgtctctacgtgggggcgcg

SEQ ID NO: 3621 - RNA, 154 nt, synthetic construct
  source 1..154: mol_type = other RNA
ggatgcagaagctttctgtagttttagagctagaaatagcaagttaaaataaggctagtccgttatcaacttgaaaaagtggcaccgagtcggtgcgcctgatcccatacagaaagcttctgcaaacattgacgcgtctctacgtgggggcgcg

SEQ ID NO: 3622 - RNA, 154 nt, synthetic construct
  source 1..154: mol_type = other RNA
ggatgcagaagctttctgtagttttagagctagaaatagcaagttaaaataaggctagtccgttatcaacttgaaaaagtggcaccgagtcggtgcaagcctgatcccatacagaaagcttctgaacattgacgcgtctctacgtgggggcgcg

SEQ ID NO: 3623 - RNA, 154 nt, synthetic construct
  source 1..154: mol_type = other RNA
ggatgcagaagctttctgtagttttagagctagaaatagcaagttaaaataaggctagtccgttatcaacttgaaaaagtggcaccgagtcggtgcggaagcctgatcccatacagaaagcttcaacattgacgcgtctctacgtgggggcgcg

SEQ ID NO: 3624 - RNA, 154 nt, synthetic construct
  source 1..154: mol_type = other RNA
ggatgcagaagctttctgtagttttagagctagaaatagcaagttaaaataaggctagtccgttatcaacttgaaaaagtggcaccgagtcggtgcgtggaagcctgatcccatacagaaagctaacattgacgcgtctctacgtgggggcgcg

SEQ ID NO: 3625 - RNA, 156 nt, synthetic construct
  source 1..156: mol_type = other RNA
ggatgcagaagctttctgtagttttagagctagaaatagcaagttaaaataaggctagtccgttatcaacttgaaaaagtggcaccgagtcggtgcaagcctgatcccatacagaaagcttctgcaaacattgacgcgtctctacgtgggggcgcg

SEQ ID NO: 3626 - RNA, 156 nt, synthetic construct
  source 1..156: mol_type = other RNA
ggatgcagaagctttctgtagttttagagctagaaatagcaagttaaaataaggctagtccgttatcaacttgaaaaagtggcaccgagtcggtgcggaagcctgatcccatacagaaagcttctgaacattgacgcgtctctacgtgggggcgcg

SEQ ID NO: 3627 - RNA, 156 nt, synthetic construct
  source 1..156: mol_type = other RNA
ggatgcagaagctttctgtagttttagagctagaaatagcaagttaaaataaggctagtccgttatcaacttgaaaaagtggcaccgagtcggtgcgtggaagcctgatcccatacagaaagcttcaacattgacgcgtctctacgtgggggcgcg

SEQ ID NO: 3628 - RNA, 158 nt, synthetic construct
  source 1..158: mol_type = other RNA
ggatgcagaagctttctgtagttttagagctagaaatagcaagttaaaataaggctagtccgttatcaacttgaaaaagtggcaccgagtcggtgcggaagcctgatcccatacagaaagcttctgcaaacattgacgcgtctctacgtgggggcgcg

SEQ ID NO: 3629 - RNA, 158 nt, synthetic construct
  source 1..158: mol_type = other RNA
ggatgcagaagctttctgtagttttagagctagaaatagcaagttaaaataaggctagtccgttatcaacttgaaaaagtggcaccgagtcggtgcgtggaagcctgatcccatacagaaagcttctgaacattgacgcgtctctacgtgggggcgcg

SEQ ID NO: 3630 - RNA, 160 nt, synthetic construct
  source 1..160: mol_type = other RNA
ggatgcagaagctttctgtagttttagagctagaaatagcaagttaaaataaggctagtccgttatcaacttgaaaaagtggcaccgagtcggtgcgtggaagcctgatcccatacagaaagcttctgcaaacattgacgcgtctctacgtgggggcgcg

SEQ ID NO: 3631-3637 - skipped (7 entries)

SEQ ID NO: 3638 - RNA, 154 nt, synthetic construct
  source 1..154: mol_type = other RNA
gtcttgctgggtttccaaaggttttagagctagaaatagcaagttaaaataaggctagtccgttatcaacttgaaaaagtggcaccgagtcggtgcatgggatcaggcttccactttggaaaccaacattgacgcgtctctacgtgggggcgcg

SEQ ID NO: 3639 - RNA, 156 nt, synthetic construct
  source 1..156: mol_type = other RNA
gtcttgctgggtttccaaaggttttagagctagaaatagcaagttaaaataaggctagtccgttatcaacttgaaaaagtggcaccgagtcggtgcatgggatcaggcttccactttggaaacccaaacattgacgcgtctctacgtgggggcgcg

SEQ ID NO: 3640 - RNA, 156 nt, synthetic construct
  source 1..156: mol_type = other RNA
gtcttgctgggtttccaaaggttttagagctagaaatagcaagttaaaataaggctagtccgttatcaacttgaaaaagtggcaccgagtcggtgcgtatgggatcaggcttccactttggaaaccaacattgacgcgtctctacgtgggggcgcg

SEQ ID NO: 3641 - RNA, 158 nt, synthetic construct
  source 1..158: mol_type = other RNA
gtcttgctgggtttccaaaggttttagagctagaaatagcaagttaaaataaggctagtccgttatcaacttgaaaaagtggcaccgagtcggtgcatgggatcaggcttccactttggaaacccagcaacattgacgcgtctctacgtgggggcgcg

SEQ ID NO: 3642 - RNA, 158 nt, synthetic construct
  source 1..158: mol_type = other RNA
gtcttgctgggtttccaaaggttttagagctagaaatagcaagttaaaataaggctagtccgttatcaacttgaaaaagtggcaccgagtcggtgcgtatgggatcaggcttccactttggaaacccaaacattgacgcgtctctacgtgggggcgcg

SEQ ID NO: 3643 - RNA, 159 nt, synthetic construct
  source 1..159: mol_type = other RNA
gtcttgctgggtttccaaaggttttagagctagaaatagcaagttaaaataaggctagtccgttatcaacttgaaaaagtggcaccgagtcggtgctctgtatgggatcaggcttccactttggaaaccaacattgacgcgtctctacgtgggggcgcg

SEQ ID NO: 3644 - RNA, 160 nt, synthetic construct
  source 1..160: mol_type = other RNA
gtcttgctgggtttccaaaggttttagagctagaaatagcaagttaaaataaggctagtccgttatcaacttgaaaaagtggcaccgagtcggtgcatgggatcaggcttccactttggaaacccagcaaaacattgacgcgtctctacgtgggggcgcg

SEQ ID NO: 3645 - RNA, 160 nt, synthetic construct
  source 1..160: mol_type = other RNA
gtcttgctgggtttccaaaggttttagagctagaaatagcaagttaaaataaggctagtccgttatcaacttgaaaaagtggcaccgagtcggtgcgtatgggatcaggcttccactttggaaacccagcaacattgacgcgtctctacgtgggggcgcg

SEQ ID NO: 3646 - RNA, 161 nt, synthetic construct
  source 1..161: mol_type = other RNA
gtcttgctgggtttccaaaggttttagagctagaaatagcaagttaaaataaggctagtccgttatcaacttgaaaaagtggcaccgagtcggtgctctgtatgggatcaggcttccactttggaaacccaaacattgacgcgtctctacgtgggggcgcg

SEQ ID NO: 3647 - RNA, 161 nt, synthetic construct
  source 1..161: mol_type = other RNA
gtcttgctgggtttccaaaggttttagagctagaaatagcaagttaaaataaggctagtccgttatcaacttgaaaaagtggcaccgagtcggtgctttctgtatgggatcaggcttccactttggaaaccaacattgacgcgtctctacgtgggggcgcg

SEQ ID NO: 3648 - RNA, 162 nt, synthetic construct
  source 1..162: mol_type = other RNA
gtcttgctgggtttccaaaggttttagagctagaaatagcaagttaaaataaggctagtccgttatcaacttgaaaaagtggcaccgagtcggtgcgtatgggatcaggcttccactttggaaacccagcaaaacattgacgcgtctctacgtgggggcgcg

SEQ ID NO: 3649 - RNA, 163 nt, synthetic construct
  source 1..163: mol_type = other RNA
gtcttgctgggtttccaaaggttttagagctagaaatagcaagttaaaataaggctagtccgttatcaacttgaaaaagtggcaccgagtcggtgctctgtatgggatcaggcttccactttggaaacccagcaacattgacgcgtctctacgtgggggcgcg

SEQ ID NO: 3650 - RNA, 163 nt, synthetic construct
  source 1..163: mol_type = other RNA
gtcttgctgggtttccaaaggttttagagctagaaatagcaagttaaaataaggctagtccgttatcaacttgaaaaagtggcaccgagtcggtgctttctgtatgggatcaggcttccactttggaaacccaaacattgacgcgtctctacgtgggggcgcg

SEQ ID NO: 3651 - RNA, 168 nt, synthetic construct
  source 1..168: mol_type = other RNA
gtgaagacaggtgtcttgctgttttagagctagaaatagcaagttaaaataaggctagtccgttatcaacttgaaaaagtggcaccgagtcggtgcatgggatcaggcttccactttggaaacccagcaagacacctgaacattgacgcgtctctacgtgggggcgcg

SEQ ID NO: 3652 - RNA, 168 nt, synthetic construct
  source 1..168: mol_type = other RNA
gtgaagacaggtgtcttgctgttttagagctagaaatagcaagttaaaataaggctagtccgttatcaacttgaaaaagtggcaccgagtcggtgcgtatgggatcaggcttccactttggaaacccagcaagacaccaacattgacgcgtctctacgtgggggcgcg

SEQ ID NO: 3653 - RNA, 170 nt, synthetic construct
  source 1..170: mol_type = other RNA
gtgaagacaggtgtcttgctgttttagagctagaaatagcaagttaaaataaggctagtccgttatcaacttgaaaaagtggcaccgagtcggtgcatgggatcaggcttccactttggaaacccagcaagacacctgtcaacattgacgcgtctctacgtgggggcgcg

SEQ ID NO: 3654 - RNA, 170 nt, synthetic construct
  source 1..170: mol_type = other RNA
gtgaagacaggtgtcttgctgttttagagctagaaatagcaagttaaaataaggctagtccgttatcaacttgaaaaagtggcaccgagtcggtgcgtatgggatcaggcttccactttggaaacccagcaagacacctgaacattgacgcgtctctacgtgggggcgcg

SEQ ID NO: 3655 - RNA, 171 nt, synthetic construct
  source 1..171: mol_type = other RNA
gtgaagacaggtgtcttgctgttttagagctagaaatagcaagttaaaataaggctagtccgttatcaacttgaaaaagtggcaccgagtcggtgctctgtatgggatcaggcttccactttggaaacccagcaagacaccaacattgacgcgtctctacgtgggggcgcg

SEQ ID NO: 3656 - RNA, 172 nt, synthetic construct
  source 1..172: mol_type = other RNA
gtgaagacaggtgtcttgctgttttagagctagaaatagcaagttaaaataaggctagtccgttatcaacttgaaaaagtggcaccgagtcggtgcatgggatcaggcttccactttggaaacccagcaagacacctgtcttaacattgacgcgtctctacgtgggggcgcg

SEQ ID NO: 3657 - RNA, 172 nt, synthetic construct
  source 1..172: mol_type = other RNA
gtgaagacaggtgtcttgctgttttagagctagaaatagcaagttaaaataaggctagtccgttatcaacttgaaaaagtggcaccgagtcggtgcgtatgggatcaggcttccactttggaaacccagcaagacacctgtcaacattgacgcgtctctacgtgggggcgcg

SEQ ID NO: 3658 - RNA, 173 nt, synthetic construct
  source 1..173: mol_type = other RNA
gtgaagacaggtgtcttgctgttttagagctagaaatagcaagttaaaataaggctagtccgttatcaacttgaaaaagtggcaccgagtcggtgcgtatgggatcaggcttccactttggaaacccagcaagacacctgtctaacattgacgcgtctctacgtgggggcgcg

SEQ ID NO: 3659 - RNA, 173 nt, synthetic construct
  source 1..173: mol_type = other RNA
gtgaagacaggtgtcttgctgttttagagctagaaatagcaagttaaaataaggctagtccgttatcaacttgaaaaagtggcaccgagtcggtgctctgtatgggatcaggcttccactttggaaacccagcaagacacctgaacattgacgcgtctctacgtgggggcgcg

SEQ ID NO: 3660 - RNA, 173 nt, synthetic construct
  source 1..173: mol_type = other RNA
gtgaagacaggtgtcttgctgttttagagctagaaatagcaagttaaaataaggctagtccgttatcaacttgaaaaagtggcaccgagtcggtgctttctgtatgggatcaggcttccactttggaaacccagcaagacaccaacattgacgcgtctctacgtgggggcgcg

SEQ ID NO: 3661 - RNA, 175 nt, synthetic construct
  source 1..175: mol_type = other RNA
gtgaagacaggtgtcttgctgttttagagctagaaatagcaagttaaaataaggctagtccgttatcaacttgaaaaagtggcaccgagtcggtgctctgtatgggatcaggcttccactttggaaacccagcaagacacctgtcaacattgacgcgtctctacgtgggggcgcg

SEQ ID NO: 3662 - RNA, 175 nt, synthetic construct
  source 1..175: mol_type = other RNA
gtgaagacaggtgtcttgctgttttagagctagaaatagcaagttaaaataaggctagtccgttatcaacttgaaaaagtggcaccgagtcggtgctttctgtatgggatcaggcttccactttggaaacccagcaagacacctgaacattgacgcgtctctacgtgggggcgcg

SEQ ID NO: 3663 - RNA, 177 nt, synthetic construct
  source 1..177: mol_type = other RNA
gtgaagacaggtgtcttgctgttttagagctagaaatagcaagttaaaataaggctagtccgttatcaacttgaaaaagtggcaccgagtcggtgctctgtatgggatcaggcttccactttggaaacccagcaagacacctgtcttaacattgacgcgtctctacgtgggggcgcg

SEQ ID NO: 3664 - RNA, 177 nt, synthetic construct
  source 1..177: mol_type = other RNA
gtgaagacaggtgtcttgctgttttagagctagaaatagcaagttaaaataaggctagtccgttatcaacttgaaaaagtggcaccgagtcggtgctttctgtatgggatcaggcttccactttggaaacccagcaagacacctgtcaacattgacgcgtctctacgtgggggcgcg

SEQ ID NO: 3665 - RNA, 179 nt, synthetic construct
  source 1..179: mol_type = other RNA
gtgaagacaggtgtcttgctgttttagagctagaaatagcaagttaaaataaggctagtccgttatcaacttgaaaaagtggcaccgagtcggtgctttctgtatgggatcaggcttccactttggaaacccagcaagacacctgtcttaacattgacgcgtctctacgtgggggcgcg

SEQ ID NO: 3666 - RNA, 76 nt, synthetic construct
  source 1..76: mol_type = other RNA
gttttagagctagaaatagcaagttaaaataaggctagtccgttatcaacttgaaaaagtggcaccgagtcggtgc

SEQ ID NO: 3667 - RNA, 76 nt, synthetic construct
  source 1..76: mol_type = other RNA
gtttgagagctagaaatagcaagtttaaataaggctagtccgttatcaacttgaaaaagtgggaccgagtcggtcc

SEQ ID NO: 3668 - RNA, 86 nt, synthetic construct
  source 1..86: mol_type = other RNA
gtttaagagctatgctggaaacagcatagcaagtttaaataaggctagtccgttatcaacttgaaaaagtggcaccgagtcggtgc

SEQ ID NO: 3669 - RNA, 76 nt, synthetic construct
  source 1..76: mol_type = other RNA
gttttagtactctggaaacagaatctactaaaacaaggcaaaatgccgtgtttatctcgtcaacttgttggcgaga

SEQ ID NO: 3670 - RNA, 76 nt, synthetic construct
  source 1..76: mol_type = other RNA
gttttagtactctggaaacagaatctactgaaacaagacaatatgtcgtgtttatcccatcaatttattggtggga

SEQ ID NO: 3671-3689 - skipped (19 entries)

SEQ ID NO: 3690 - protein, 677 aa, synthetic construct
TLNIEDEYRLHETSKEPDVSLGSTWLSDFPQAWAETGGMGLAVRQAPLIIPLKATSTPVSIKQYPMSQEARLGIKPHIQRLLDQGILVPCQSPWNTPLLPVKKPGTNDYRPVQDLREVNKRVEDIHPTVPNPYNLLSGLPPSHQWYTVLDLKDAFFCLRLHPTSQPLFAFEWRDPEMGISGQLTWTRLPQGFKNSPTLFDEALHRDLADFRIQHPDLILLQYVDDLLLAATSELDCQQGTRALLQTLGNLGYRASAKKAQICQKQVKYLGYLLKEGQRWLTEARKETVMGQPTPKTPRQLREFLGTAGFCRLWIPGFAEMAAPLYPLTKTGTLFNWGPDQQKAYQEIKQALLTAPALGLPDLTKPFELFVDEKQGYAKGVLTQKLGPWRRPVAYLSKKLDPVAAGWPPCLRMVAAIAVLTKDAGKLTMGQPLVILAPHAVEALVKQPPDRWLSNARMTHYQALLLDTDRVQFGPVVALNPATLLPLPEEGLQHNCLDILAEAHGTRPDLTDQPLPDADHTWYTDGSSLLQEGQRKAGAAVTTETEVIWAKALPAGTSAQRAELIALTQALKMAEGKKLNVYTDSRYAFATAHIHGEIYRRRGLLTSEGKEIKNKDEILALLKALFLPKRLSIIHCPGHQKGHSAEARGNRMADQAARKAAITETPDTSTLLIENSSP

SEQ ID NO: 3691 - protein, 677 aa, Moloney murine leukemia virus
TLNIEDEHRLHETSKEPDVSLGSTWLSDFPQAWAETGGMGLAVRQAPLIIPLKATSTPVSIKQYPMSQEARLGIKPHIQRLLDQGILVPCQSPWNTPLLPVKKPGTNDYRPVQDLREVNKRVEDIHPTVPNPYNLLSGLPPSHQWYTVLDLKDAFFCLRLHPTSQPLFAFEWRDPEMGISGQLTWTRLPQGFKNSPTLFDEALHRDLADFRIQHPDLILLQYVDDLLLAATSELDCQQGTRALLQTLGNLGYRASAKKAQICQKQVKYLGYLLKEGQRWLTEARKETVMGQPTPKTPRQLREFLGTAGFCRLWIPGFAEMAAPLYPLTKTGTLFNWGPDQQKAYQEIKQALLTAPALGLPDLTKPFELFVDEKQGYAKGVLTQKLGPWRRPVAYLSKKLDPVAAGWPPCLRMVAAIAVLTKDAGKLTMGQPLVILAPHAVEALVKQPPDRWLSNARMTHYQALLLDTDRVQFGPVVALNPATLLPLPEEGLQHNCLDILAEAHGTRPDLTDQPLPDADHTWYTDGSSLLQEGQRKAGAAVTTETEVIWAKALPAGTSAQRAELIALTQALKMAEGKKLNVYTDSRYAFATAHIHGEIYRRRGLLTSEGKEIKNKDEILALLKALFLPKRLSIIHCPGHQKGHSAEARGNRMADQAARKAAITETPDTSTLLIENSSP

SEQ ID NO: 3692 - protein, 677 aa, synthetic construct
TLNIEDEYRLHETSKEPDVSLGSTWLSDFPQAWAETGGMGLAVRQAPLIIPLKATSTPVSIKQYPMSQEARLGIKPHIQRLLDQGILVPCQSPWNTPLLPVKKPGTNDYRPVQDLREVNKRVEDIHPTVPNPYNLLSGLPPSHQWYTVLDLKDAFFCLRLHPTSQPLFAFEWRDPEMGISGQLTWTRLPQGFKNSPTLFNEALHRDLADFRIQHPDLILLQYVDDLLLAATSELDCQQGTRALLQTLGNLGYRASAKKAQICQKQVKYLGYLLKEGQRWLTEARKETVMGQPTPKTPRQLREFLGKAGFCRLFIPGFAEMAAPLYPLTKPGTLFNWGPDQQKAYQEIKQALLTAPALGLPDLTKPFELFVDEKQGYAKGVLTQKLGPWRRPVAYLSKKLDPVAAGWPPCLRMVAAIAVLTKDAGKLTMGQPLVILAPHAVEALVKQPPDRWLSNARMTHYQALLLDTDRVQFGPVVALNPATLLPLPEEGLQHNCLDILAEAHGTRPDLTDQPLPDADHTWYTDGSSLLQEGQRKAGAAVTTETEVIWAKALPAGTSAQRAELIALTQALKMAEGKKLNVYTDSRYAFATAHIHGEIYRRRGWLTSEGKEIKNKDEILALLKALFLPKRLSIIHCPGHQKGHSAEARGNRMADQAARKAAITETPDTSTLLIENSSP

SEQ ID NO: 3693 - protein, 1368 aa, Streptococcus pyogenes [sequence omitted]

SEQ ID NO: 3694 - protein, 1368 aa, synthetic construct
MDKKYSIGLDIGTNSVGWAVITDEYKVPSKKFKVLGNTDRHSIKKNLIGALLFDSGETAEATRLKRTARRRYTRRKNRICYLQEIFSNEMAKVDDSFFHRLEESFLVEEDKKHERHPIFGNIVDEVAYHEKYPTIYHLRKKLVDSTDKADLRLIYLALAHMIKFRGHFLIEGDLNPDNSDVDKLFIQLVQTYNQLFEENPINASGVDAKAILSARLSKSRRLENLIAQLPGEKKNGLFGNLIALSLGLTPNFKSNFDLAEDAKLQLSKDTYDDDLDNLLAQIGDQYADLFLAAKNLSDAILLSDILRVNTEITKAPLSASMIKRYDEHHQDLTLLKALVRQQLPEKYKEIFFDQSKNGYAGYIDGGASQEEFYKFIKPILEKMDGTEELLVKLNREDLLRKQRTFDNGSIPHQIHLGELHAILRRQEDFYPFLKDNREKIEKILTFRIPYYVGPLARGNSRFAWMTRKSEETITPWNFEEVVDKGASAQSFIERMTNFDKNLPNEKVLPKHSLLYEYFTVYNELTKVKYVTEGMRKPAFLSGEQKKAIVDLLFKTNRKVTVKQLKEDYFKKIECFDSVEISGVEDRFNASLGTYHDLLKIIKDKDFLDNEENEDILEDIVLTLTLFEDREMIEERLKTYAHLFDDKVMKQLKRRRYTGWGRLSRKLINGIRDKQSGKTILDFLKSDGFANRNFMQLIHDDSLTFKEDIQKAQVSGQGDSLHEHIANLAGSPAIKKGILQTVKVVDELVKVMGRHKPENIVIEMARENQTTQKGQKNSRERMKRIEEGIKELGSQILKEHPVENTQLQNEKLYLYYLQNGRDMYVDQELDINRLSDYDVDAIVPQSFLKDDSIDNKVLTRSDKNRGKSDNVPSEEVVKKMKNYWRQLLNAKLITQRKFDNLTKAERGGLSELDKAGFIKRQLVETRQITKHVAQILDSRMNTKYDENDKLIREVKVITLKSKLVSDFRKDFQFYKVREINNYHHAHDAYLNAVVGTALIKKYPKLESEFVYGDYKVYDVRKMIAKSEQEIGKATAKYFFYSNIMNFFKTEITLANGEIRKRPLIETNGETGEIVWDKGRDFATVRKVLSMPQVNIVKKTEVQTGGFSKESILPKRNSDKLIARKKDWDPKKYGGFDSPTVAYSVLVVAKVEKGKSKKLKSVKELLGITIMERSSFEKNPIDFLEAKGYKEVKKDLIIKLPKYSLFELENGRKRMLASAGELQKGNELALPSKYVNFLYLASHYEKLKGSPEDNEQKQLFVEQHKHYLDEIIEQISEFSKRVILADANLDKVLSAYNKHRDKPIREQAENIIHLFTLTNLGAPAAFKYFDTTIDRKRYTSTKEVLDATLIHQSITGLYETRIDLSQLGGD

SEQ ID NO: 3695 - protein, 1367 aa, synthetic construct
DKKYSIGLDIGTNSVGWAVITDEYKVPSKKFKVLGNTDRHSIKKNLIGALLFDSGETAEATRLKRTARRRYTRRKNRICYLQEIFSNEMAKVDDSFFHRLEESFLVEEDKKHERHPIFGNIVDEVAYHEKYPTIYHLRKKLVDSTDKADLRLIYLALAHMIKFRGHFLIEGDLNPDNSDVDKLFIQLVQTYNQLFEENPINASGVDAKAILSARLSKSRRLENLIAQLPGEKKNGLFGNLIALSLGLTPNFKSNFDLAEDAKLQLSKDTYDDDLDNLLAQIGDQYADLFLAAKNLSDAILLSDILRVNTEITKAPLSASMIKRYDEHHQDLTLLKALVRQQLPEKYKEIFFDQSKNGYAGYIDGGASQEEFYKFIKPILEKMDGTEELLVKLNREDLLRKQRTFDNGSIPHQIHLGELHAILRRQEDFYPFLKDNREKIEKILTFRIPYYVGPLARGNSRFAWMTRKSEETITPWNFEEVVDKGASAQSFIERMTNFDKNLPNEKVLPKHSLLYEYFTVYNELTKVKYVTEGMRKPAFLSGEQKKAIVDLLFKTNRKVTVKQLKEDYFKKIECFDSVEISGVEDRFNASLGTYHDLLKIIKDKDFLDNEENEDILEDIVLTLTLFEDREMIEERLKTYAHLFDDKVMKQLKRRRYTGWGRLSRKLINGIRDKQSGKTILDFLKSDGFANRNFMQLIHDDSLTFKEDIQKAQVSGQGDSLHEHIANLAGSPAIKKGILQTVKVVDELVKVMGRHKPENIVIEMARENQTTQKGQKNSRERMKRIEEGIKELGSQILKEHPVENTQLQNEKLYLYYLQNGRDMYVDQELDINRLSDYDVDAIVPQSFLKDDSIDNKVLTRSDKNRGKSDNVPSEEVVKKMKNYWRQLLNAKLITQRKFDNLTKAERGGLSELDKAGFIKRQLVETRQITKHVAQILDSRMNTKYDENDKLIREVKVITLKSKLVSDFRKDFQFYKVREINNYHHAHDAYLNAVVGTALIKKYPKLESEFVYGDYKVYDVRKMIAKSEQEIGKATAKYFFYSNIMNFFKTEITLANGEIRKRPLIETNGETGEIVWDKGRDFATVRKVLSMPQVNIVKKTEVQTGGFSKESILPKRNSDKLIARKKDWDPKKYGGFDSPTVAYSVLVVAKVEKGKSKKLKSVKELLGITIMERSSFEKNPIDFLEAKGYKEVKKDLIIKLPKYSLFELENGRKRMLASAGELQKGNELALPSKYVNFLYLASHYEKLKGSPEDNEQKQLFVEQHKHYLDEIIEQISEFSKRVILADANLDKVLSAYNKHRDKPIREQAENIIHLFTLTNLGAPAAFKYFDTTIDRKRYTSTKEVLDATLIHQSITGLYETRIDLSQLGGD

SEQ ID NO: 3696 - protein, 1367 aa, synthetic construct
DKKYSIGLDIGTNSVGWAVITDEYKVPSKKFKVLGNTDRHSIKKNLIGALLFDSGETAEATRLKRTARRRYTRRKNRICYLQEIFSNEMAKVDDSFFHRLEESFLVEEDKKHERHPIFGNIVDEVAYHEKYPTIYHLRKKLVDSTDKADLRLIYLALAHMIKFRGHFLIEGDLNPDNSDVDKLFIQLVQTYNQLFEENPINASGVDAKAILSARLSKSRKLENLIAQLPGEKKNGLFGNLIALSLGLTPNFKSNFDLAEDAKLQLSKDTYDDDLDNLLAQIGDQYADLFLAAKNLSDAILLSDILRVNTEITKAPLSASMIKRYDEHHQDLTLLKALVRQQLPEKYKEIFFDQSKNGYAGYIDGGASQEEFYKFIKPILEKMDGTEELLVKLKREDLLRKQRTFDNGSIPHQIHLGELHAILRRQEDFYPFLKDNREKIEKILTFRIPYYVGPLARGNSRFAWMTRKSEETITPWNFEEVVDKGASAQSFIERMTNFDKNLPNEKVLPKHSLLYEYFTVYNELTKVKYVTEGMRKPAFLSGEQKKAIVDLLFKTNRKVTVKQLKEDYFKKIECFDSVEISGVEDRFNASLGTYHDLLKIIKDKDFLDNEENEDILEDIVLTLTLFEDREMIEERLKTYAHLFDDKVMKQLKRRRYTGWGRLSRKLINGIRDKQSGKTILDFLKSDGFANRNFMQLIHDDSLTFKEDIQKAQVSGQGDSLHEHIANLAGSPAIKKGILQTVKVVDELVKVMGRHKPENIVIEMARENQTTQKGQKNSRERMKRIEEGIKELGSQILKEHPVENTQLQNEKLYLYYLQNGRDMYVDQELDINRLSDYDVDAIVPQSFLKDDSIDNKVLTRSDKNRGKSDNVPSEEVVKKMKNYWRQLLNAKLITQRKFDNLTKAERGGLSELDKAGFIKRQLVETRQITKHVAQILDSRMNTKYDENDKLIREVKVITLKSKLVSDFRKDFQFYKVREINNYHHAHDAYLNAVVGTALIKKYPKLESEFVYGDYKVYDVRKMIAKSEQEIGKATAKYFFYSNIMNFFKTEITLANGEIRKRPLIETNGETGEIVWDKGRDFATVRKVLSMPQVNIVKKTEVQTGGFSKESILPKRNSDKLIARKKDWDPKKYGGFDSPTVAYSVLVVAKVEKGKSKKLKSVKELLGITIMERSSFEKNPIDFLEAKGYKEVKKDLIIKLPKYSLFELENGRKRMLASAGELQKGNELALPSKYVNFLYLASHYEKLKGSPEDNEQKQLFVEQHKHYLDEIIEQISEFSKRVILADANLDKVLSAYNKHRDKPIREQAENIIHLFTLTNLGAPAAFKYFDTTIDRKRYTSTKEVLDATLIHQSITGLYETRIDLSQLGGD

SEQ ID NO: 3697 - protein, 1054 aa, synthetic construct
MNQKFILGLDIGITSVGYGLIDYETKNIIDAGVRLFPEANVENNEGRRSKRGSRRLKRRRIHRLERVKKLLEDYNLLDQSQIPQSTNPYAIRVKGLSEALSKDELVIALLHIAKRRGIHKIDVIDSNDDVGNELSTKEQLNKNSKLLKDKFVCQIQLERMNEGQVRGEKNRFKTADIIKEIIQLLNVQKNFHQLDENFINKYIELVEMRREYFEGPGKGSPYGWEGDPKAWYETLMGHCTYFPDELRSVKYAYSADLFNALNDLNNLVIQRDGLSKLEYHEKYHIIENVFKQKKKPTLKQIANEINVNPEDIKGYRITKSGKPQFTEFKLYHDLKSVLFDQSILENEDVLDQIAEILTIYQDKDSIKSKLTELDILLNEEDKENIAQLTGYTGTHRLSLKCIRLVLEEQWYSSRNQMEIFTHLNIKPKKINLTAANKIPKAMIDEFILSPVVKRTFGQAINLINKIIEKYGVPEDIIIELARENNSKDKQKFINEMQKKNENTRKRINEIIGKYGNQNAKRLVEKIRLHDEQEGKCLYSLESIPLEDLLNNPNHYEVDHIIPRSVSFDNSYHNKVLVKQSENSKKSNLTPYQYFNSGKSKLSYNQFKQHILNLSKSQDRISKKKKEYLLEERDINKFEVQKEFINRNLVDTRYATRELTNYLKAYFSANNMNVKVKTINGSFTDYLRKVWKFKKERNHGYKHHAEDALIIANADFLFKENKKLKAVNSVLEKPEIESKQLDIQVDSEDNYSEMFIIPKQVQDIKDFRNFKYSHRVDKKPNRQLINDTLYSTRKKDNSTYIVQTIKDIYAKDNTTLKKQFDKSPEKFLMYQHDPRTFEKLEVIMKQYANEKNPLAKYHEETGEYLTKYSKKNNGPIVKSLKYIGNKLGSHLDVTHQFKSSTKKLVKLSIKPYRFDVYLTDKGYKFITISYLDVLKKDNYYYIPEQKYDKLKLGKAIDKNAKFIASFYKNDLIKLDGEIYKIIGVNSDTRNMIELDLPDIRYKEYCELNNIKGEPRIKKTIGKKVNSIEKLTTDVLGNVFTNTQYTKPQLLFKRGN

SEQ ID NO: 3698 - protein, 1054 aa, synthetic construct
MNQKFILGLDIGITSVGYGLIDYETKNIIDAGVRLFPEANVENNEGRRSKRGSRRLKRRRIHRLERVKKLLEDYNLLDQSQIPQSTNPYAIRVKGLSEALSKDELVIALLHIAKRRGIHKIDVIDSNDDVGNELSTKEQLNKNSKLLKDKFVCQIQLERMNEGQVRGEKNRFKTADIIKEIIQLLNVQKNFHQLDENFINKYIELVEMRREYFEGPGKGSPYGWEGDPKAWYETLMGHCTYFPDELRSVKYAYSADLFNALNDLNNLVIQRDGLSKLEYHEKYHIIENVFKQKKKPTLKQIANEINVNPEDIKGYRITKSGKPQFTEFKLYHDLKSVLFDQSILENEDVLDQIAEILTIYQDKDSIKSKLTELDILLNEEDKENIAQLTGYTGTHRLSLKCIRLVLEEQWYSSRNQMEIFTHLNIKPKKINLTAANKIPKAMIDEFILSPVVKRTFGQAINLINKIIEKYGVPEDIIIELARENNSKDKQKFINEMQKKNENTRKRINEIIGKYGNQNAKRLVEKIRLHDEQEGKCLYSLESIPLEDLLNNPNHYEVDHIIPRSVSFDNSYHNKVLVKQSEASKKSNLTPYQYFNSGKSKLSYNQFKQHILNLSKSQDRISKKKKEYLLEERDINKFEVQKEFINRNLVDTRYATRELTNYLKAYFSANNMNVKVKTINGSFTDYLRKVWKFKKERNHGYKHHAEDALIIANADFLFKENKKLKAVNSVLEKPEIESKQLDIQVDSEDNYSEMFIIPKQVQDIKDFRNFKYSHRVDKKPNRQLINDTLYSTRKKDNSTYIVQTIKDIYAKDNTTLKKQFDKSPEKFLMYQHDPRTFEKLEVIMKQYANEKNPLAKYHEETGEYLTKYSKKNNGPIVKSLKYIGNKLGSHLDVTHQFKSSTKKLVKLSIKPYRFDVYLTDKGYKFITISYLDVLKKDNYYYIPEQKYDKLKLGKAIDKNAKFIASFYKNDLIKLDGEIYKIIGVNSDTRNMIELDLPDIRYKEYCELNNIKGEPRIKKTIGKKVNSIEKLTTDVLGNVFTNTQYTKPQLLFKRGN

SEQ ID NO: 3699 - protein, 1053 aa, synthetic construct
NQKFILGLDIGITSVGYGLIDYETKNIIDAGVRLFPEANVENNEGRRSKRGSRRLKRRRIHRLERVKKLLEDYNLLDQSQIPQSTNPYAIRVKGLSEALSKDELVIALLHIAKRRGIHKIDVIDSNDDVGNELSTKEQLNKNSKLLKDKFVCQIQLERMNEGQVRGEKNRFKTADIIKEIIQLLNVQKNFHQLDENFINKYIELVEMRREYFEGPGKGSPYGWEGDPKAWYETLMGHCTYFPDELRSVKYAYSADLFNALNDLNNLVIQRDGLSKLEYHEKYHIIENVFKQKKKPTLKQIANEINVNPEDIKGYRITKSGKPQFTEFKLYHDLKSVLFDQSILENEDVLDQIAEILTIYQDKDSIKSKLTELDILLNEEDKENIAQLTGYTGTHRLSLKCIRLVLEEQWYSSRNQMEIFTHLNIKPKKINLTAANKIPKAMIDEFILSPVVKRTFGQAINLINKIIEKYGVPEDIIIELARENNSKDKQKFINEMQKKNENTRKRINEIIGKYGNQNAKRLVEKIRLHDEQEGKCLYSLESIPLEDLLNNPNHYEVDHIIPRSVSFDNSYHNKVLVKQSEASKKSNLTPYQYFNSGKSKLSYNQFKQHILNLSKSQDRISKKKKEYLLEERDINKFEVQKEFINRNLVDTRYATRELTNYLKAYFSANNMNVKVKTINGSFTDYLRKVWKFKKERNHGYKHHAEDALIIANADFLFKENKKLKAVNSVLEKPEIESKQLDIQVDSEDNYSEMFIIPKQVQDIKDFRNFKYSHRVDKKPNRQLINDTLYSTRKKDNSTYIVQTIKDIYAKDNTTLKKQFDKSPEKFLMYQHDPRTFEKLEVIMKQYANEKNPLAKYHEETGEYLTKYSKKNNGPIVKSLKYIGNKLGSHLDVTHQFKSSTKKLVKLSIKPYRFDVYLTDKGYKFITISYLDVLKKDNYYYIPEQKYDKLKLGKAIDKNAKFIASFYKNDLIKLDGEIYKIIGVNSDTRNMIELDLPDIRYKEYCELNNIKGEPRIKKTIGKKVNSIEKLTTDVLGNVFTNTQYTKPQLLFKRGN

SEQ ID NO: 3700 - protein, 1053 aa, Staphylococcus aureus
MKRNYILGLDIGITSVGYGIIDYETRDVIDAGVRLFKEANVENNEGRRSKRGARRLKRRRRHRIQRVKKLLFDYNLLTDHSELSGINPYEARVKGLSQKLSEEEFSAALLHLAKRRGVHNVNEVEEDTGNELSTKEQISRNSKALEEKYVAELQLERLKKDGEVRGSINRFKTSDYVKEAKQLLKVQKAYHQLDQSFIDTYIDLLETRRTYYEGPGEGSPFGWKDIKEWYEMLMGHCTYFPEELRSVKYAYNADLYNALNDLNNLVITRDENEKLEYYEKFQIIENVFKQKKKPTLKQIAKEILVNEEDIKGYRVTSTGKPEFTNLKVYHDIKDITARKEIIENAELLDQIAKILTIYQSSEDIQEELTNLNSELTQEEIEQISNLKGYTGTHNLSLKAINLILDELWHTNDNQIAIFNRLKLVPKKVDLSQQKEIPTTLVDDFILSPVVKRSFIQSIKVINAIIKKYGLPNDIIIELAREKNSKDAQKMINEMQKRNRQTNERIEEIIRTTGKENAKYLIEKIKLHDMQEGKCLYSLEAIPLEDLLNNPFNYEVDHIIPRSVSFDNSFNNKVLVKQEENSKKGNRTPFQYLSSSDSKISYETFKKHILNLAKGKGRISKTKKEYLLEERDINRFSVQKDFINRNLVDTRYATRGLMNLLRSYFRVNNLDVKVKSINGGFTSFLRRKWKFKKERNKGYKHHAEDALIIANADFIFKEWKKLDKAKKVMENQMFEEKQAESMPEIETEQEYKEIFITPHQIKHIKDFKDYKYSHRVDKKPNRELINDTLYSTRKDDKGNTLIVNNLNGLYDKDNDKLKKLINKSPEKLLMYHHDPQTYQKLKLIMEQYGDEKNPLYKYYEETGNYLTKYSKKDNGPVIKKIKYYGNKLNAHLDITDDYPNSRNKVVKLSLKPYRFDVYLDNGVYKFVTVKNLDVIKKENYYEVNSKCYEEAKKLKKISNQAEFIASFYNNDLIKINGELYRVIGVNNDLLNRIEVNMIDITYREYLENMNDKRPPRIIKTIASKTQSIKKYSTDILGNLYEVKSKKHPQIIKKG

SEQ ID NO: 3701 - protein, 1053 aa, synthetic construct
MKRNYILGLDIGITSVGYGIIDYETRDVIDAGVRLFKEANVENNEGRRSKRGARRLKRRRRHRIQRVKKLLFDYNLLTDHSELSGINPYEARVKGLSQKLSEEEFSAALLHLAKRRGVHNVNEVEEDTGNELSTKEQISRNSKALEEKYVAELQLERLKKDGEVRGSINRFKTSDYVKEAKQLLKVQKAYHQLDQSFIDTYIDLLETRRTYYEGPGEGSPFGWKDIKEWYEMLMGHCTYFPEELRSVKYAYNADLYNALNDLNNLVITRDENEKLEYYEKFQIIENVFKQKKKPTLKQIAKEILVNEEDIKGYRVTSTGKPEFTNLKVYHDIKDITARKEIIENAELLDQIAKILTIYQSSEDIQEELTNLNSELTQEEIEQISNLKGYTGTHNLSLKAINLILDELWHTNDNQIAIFNRLKLVPKKVDLSQQKEIPTTLVDDFILSPVVKRSFIQSIKVINAIIKKYGLPNDIIIELAREKNSKDAQKMINEMQKRNRQTNERIEEIIRTTGKENAKYLIEKIKLHDMQEGKCLYSLEAIPLEDLLNNPFNYEVDHIIPRSVSFDNSFNNKVLVKQEEASKKGNRTPFQYLSSSDSKISYETFKKHILNLAKGKGRISKTKKEYLLEERDINRFSVQKDFINRNLVDTRYATRGLMNLLRSYFRVNNLDVKVKSINGGFTSFLRRKWKFKKERNKGYKHHAEDALIIANADFIFKEWKKLDKAKKVMENQMFEEKQAESMPEIETEQEYKEIFITPHQIKHIKDFKDYKYSHRVDKKPNRELINDTLYSTRKDDKGNTLIVNNLNGLYDKDNDKLKKLINKSPEKLLMYHHDPQTYQKLKLIMEQYGDEKNPLYKYYEETGNYLTKYSKKDNGPVIKKIKYYGNKLNAHLDITDDYPNSRNKVVKLSLKPYRFDVYLDNGVYKFVTVKNLDVIKKENYYEVNSKCYEEAKKLKKISNQAEFIASFYNNDLIKINGELYRVIGVNNDLLNRIEVNMIDITYREYLENMNDKRPPRIIKTIASKTQSIKKYSTDILGNLYEVKSKKHPQIIKKG

SEQ ID NO: 3702 - protein, 1052 aa, synthetic construct
KRNYILGLDIGITSVGYGIIDYETRDVIDAGVRLFKEANVENNEGRRSKRGARRLKRRRRHRIQRVKKLLFDYNLLTDHSELSGINPYEARVKGLSQKLSEEEFSAALLHLAKRRGVHNVNEVEEDTGNELSTKEQISRNSKALEEKYVAELQLERLKKDGEVRGSINRFKTSDYVKEAKQLLKVQKAYHQLDQSFIDTYIDLLETRRTYYEGPGEGSPFGWKDIKEWYEMLMGHCTYFPEELRSVKYAYNADLYNALNDLNNLVITRDENEKLEYYEKFQIIENVFKQKKKPTLKQIAKEILVNEEDIKGYRVTSTGKPEFTNLKVYHDIKDITARKEIIENAELLDQIAKILTIYQSSEDIQEELTNLNSELTQEEIEQISNLKGYTGTHNLSLKAINLILDELWHTNDNQIAIFNRLKLVPKKVDLSQQKEIPTTLVDDFILSPVVKRSFIQSIKVINAIIKKYGLPNDIIIELAREKNSKDAQKMINEMQKRNRQTNERIEEIIRTTGKENAKYLIEKIKLHDMQEGKCLYSLEAIPLEDLLNNPFNYEVDHIIPRSVSFDNSFNNKVLVKQEEASKKGNRTPFQYLSSSDSKISYETFKKHILNLAKGKGRISKTKKEYLLEERDINRFSVQKDFINRNLVDTRYATRGLMNLLRSYFRVNNLDVKVKSINGGFTSFLRRKWKFKKERNKGYKHHAEDALIIANADFIFKEWKKLDKAKKVMENQMFEEKQAESMPEIETEQEYKEIFITPHQIKHIKDFKDYKYSHRVDKKPNRELINDTLYSTRKDDKGNTLIVNNLNGLYDKDNDKLKKLINKSPEKLLMYHHDPQTYQKLKLIMEQYGDEKNPLYKYYEETGNYLTKYSKKDNGPVIKKIKYYGNKLNAHLDITDDYPNSRNKVVKLSLKPYRFDVYLDNGVYKFVTVKNLDVIKKENYYEVNSKCYEEAKKLKKISNQAEFIASFYNNDLIKINGELYRVIGVNNDLLNRIEVNMIDITYREYLENMNDKRPPRIIKTIASKTQSIKKYSTDILGNLYEVKSKKHPQIIKKG

SEQ ID NO: 3703 - protein, 1368 aa, synthetic construct
MDKKYSIGLDIGTNSVGWAVITDEYKVPSKKFKVLGNTDRHSIKKNLIGALLFDSGETAEATRLKRTARRRYTRRKNRICYLQEIFSNEMAKVDDSFFHRLEESFLVEEDKKHERHPIFGNIVDEVAYHEKYPTIYHLRKKLVDSTDKADLRLIYLALAHMIKFRGHFLIEGDLNPDNSDVDKLFIQLVQTYNQLFEENPINASGVDAKAILSARLSKSRRLENLIAQLPGEKKNGLFGNLIALSLGLTPNFKSNFDLAEDAKLQLSKDTYDDDLDNLLAQIGDQYADLFLAAKNLSDAILLSDILRVNTEITKAPLSASMIKRYDEHHQDLTLLKALVRQQLPEKYKEIFFDQSKNGYAGYIDGGASQEEFYKFIKPILEKMDGTEELLVKLNREDLLRKQRTFDNGSIPHQIHLGELHAILRRQEDFYPFLKDNREKIEKILTFRIPYYVGPLARGNSRFAWMTRKSEETITPWNFEEVVDKGASAQSFIERMTNFDKNLPNEKVLPKHSLLYEYFTVYNELTKVKYVTEGMRKPAFLSGEQKKAIVDLLFKTNRKVTVKQLKEDYFKKIECFDSVEISGVEDRFNASLGTYHDLLKIIKDKDFLDNEENEDILEDIVLTLTLFEDREMIEERLKTYAHLFDDKVMKQLKRRRYTGWGRLSRKLINGIRDKQSGKTILDFLKSDGFANRNFMQLIHDDSLTFKEDIQKAQVSGQGDSLHEHIANLAGSPAIKKGILQTVKVVDELVKVMGRHKPENIVIEMARENQTTQKGQKNSRERMKRIEEGIKELGSQILKEHPVENTQLQNEKLYLYYLQNGRDMYVDQELDINRLSDYDVDHIVPQSFLKDDSIDNKVLTRSDKNRGKSDNVPSEEVVKKMKNYWRQLLNAKLITQRKFDNLTKAERGGLSELDKAGFIKRQLVETRQITKHVAQILDSRMNTKYDENDKLIREVKVITLKSKLVSDFRKDFQFYKVREINNYHHAHDAYLNAVVGTALIKKYPKLESEFVYGDYKVYDVRKMIAKSEQEIGKATAKYFFYSNIMNFFKTEITLANGEIRKRPLIETNGETGEIVWDKGRDFATVRKVLSMPQVNIVKKTEVQTGGFSKESIRPKRNSDKLIARKKDWDPKKYGGFVSPTVAYSVLVVAKVEKGKSKKLKSVKELLGITIMERSSFEKNPIDFLEAKGYKEVKKDLIIKLPKYSLFELENGRKRMLASARFLQKGNELALPSKYVNFLYLASHYEKLKGSPEDNEQKQLFVEQHKHYLDEIIEQISEFSKRVILADANLDKVLSAYNKHRDKPIREQAENIIHLFTLTNLGAPRAFKYFDTTIDRKVYRSTKEVLDATLIHQSITGLYETRIDLSQLGGD

SEQ ID NO: 3704 - protein, 1368 aa, synthetic construct
MDKKYSIGLDIGTNSVGWAVITDEYKVPSKKFKVLGNTDRHSIKKNLIGALLFDSGETAEATRLKRTARRRYTRRKNRICYLQEIFSNEMAKVDDSFFHRLEESFLVEEDKKHERHPIFGNIVDEVAYHEKYPTIYHLRKKLVDSTDKADLRLIYLALAHMIKFRGHFLIEGDLNPDNSDVDKLFIQLVQTYNQLFEENPINASGVDAKAILSARLSKSRRLENLIAQLPGEKKNGLFGNLIALSLGLTPNFKSNFDLAEDAKLQLSKDTYDDDLDNLLAQIGDQYADLFLAAKNLSDAILLSDILRVNTEITKAPLSASMIKRYDEHHQDLTLLKALVRQQLPEKYKEIFFDQSKNGYAGYIDGGASQEEFYKFIKPILEKMDGTEELLVKLNREDLLRKQRTFDNGSIPHQIHLGELHAILRRQEDFYPFLKDNREKIEKILTFRIPYYVGPLARGNSRFAWMTRKSEETITPWNFEEVVDKGASAQSFIERMTNFDKNLPNEKVLPKHSLLYEYFTVYNELTKVKYVTEGMRKPAFLSGEQKKAIVDLLFKTNRKVTVKQLKEDYFKKIECFDSVEISGVEDRFNASLGTYHDLLKIIKDKDFLDNEENEDILEDIVLTLTLFEDREMIEERLKTYAHLFDDKVMKQLKRRRYTGWGRLSRKLINGIRDKQSGKTILDFLKSDGFANRNFMQLIHDDSLTFKEDIQKAQVSGQGDSLHEHIANLAGSPAIKKGILQTVKVVDELVKVMGRHKPENIVIEMARENQTTQKGQKNSRERMKRIEEGIKELGSQILKEHPVENTQLQNEKLYLYYLQNGRDMYVDQELDINRLSDYDVDAIVPQSFLKDDSIDNKVLTRSDKNRGKSDNVPSEEVVKKMKNYWRQLLNAKLITQRKFDNLTKAERGGLSELDKAGFIKRQLVETRQITKHVAQILDSRMNTKYDENDKLIREVKVITLKSKLVSDFRKDFQFYKVREINNYHHAHDAYLNAVVGTALIKKYPKLESEFVYGDYKVYDVRKMIAKSEQEIGKATAKYFFYSNIMNFFKTEITLANGEIRKRPLIETNGETGEIVWDKGRDFATVRKVLSMPQVNIVKKTEVQTGGFSKESIRPKRNSDKLIARKKDWDPKKYGGFVSPTVAYSVLVVAKVEKGKSKKLKSVKELLGITIMERSSFEKNPIDFLEAKGYKEVKKDLIIKLPKYSLFELENGRKRMLASARFLQKGNELALPSKYVNFLYLASHYEKLKGSPEDNEQKQLFVEQHKHYLDEIIEQISEFSKRVILADANLDKVLSAYNKHRDKPIREQAENIIHLFTLTNLGAPRAFKYFDTTIDRKVYRSTKEVLDATLIHQSITGLYETRIDLSQLGGD

SEQ ID NO: 3705 - protein, 1367 aa, synthetic construct
DKKYSIGLDIGTNSVGWAVITDEYKVPSKKFKVLGNTDRHSIKKNLIGALLFDSGETAEATRLKRTARRRYTRRKNRICYLQEIFSNEMAKVDDSFFHRLEESFLVEEDKKHERHPIFGNIVDEVAYHEKYPTIYHLRKKLVDSTDKADLRLIYLALAHMIKFRGHFLIEGDLNPDNSDVDKLFIQLVQTYNQLFEENPINASGVDAKAILSARLSKSRRLENLIAQLPGEKKNGLFGNLIALSLGLTPNFKSNFDLAEDAKLQLSKDTYDDDLDNLLAQIGDQYADLFLAAKNLSDAILLSDILRVNTEITKAPLSASMIKRYDEHHQDLTLLKALVRQQLPEKYKEIFFDQSKNGYAGYIDGGASQEEFYKFIKPILEKMDGTEELLVKLNREDLLRKQRTFDNGSIPHQIHLGELHAILRRQEDFYPFLKDNREKIEKILTFRIPYYVGPLARGNSRFAWMTRKSEETITPWNFEEVVDKGASAQSFIERMTNFDKNLPNEKVLPKHSLLYEYFTVYNELTKVKYVTEGMRKPAFLSGEQKKAIVDLLFKTNRKVTVKQLKEDYFKKIECFDSVEISGVEDRFNASLGTYHDLLKIIKDKDFLDNEENEDILEDIVLTLTLFEDREMIEERLKTYAHLFDDKVMKQLKRRRYTGWGRLSRKLINGIRDKQSGKTILDFLKSDGFANRNFMQLIHDDSLTFKEDIQKAQVSGQGDSLHEHIANLAGSPAIKKGILQTVKVVDELVKVMGRHKPENIVIEMARENQTTQKGQKNSRERMKRIEEGIKELGSQILKEHPVENTQLQNEKLYLYYLQNGRDMYVDQELDINRLSDYDVDAIVPQSFLKDDSIDNKVLTRSDKNRGKSDNVPSEEVVKKMKNYWRQLLNAKLITQRKFDNLTKAERGGLSELDKAGFIKRQLVETRQITKHVAQILDSRMNTKYDENDKLIREVKVITLKSKLVSDFRKDFQFYKVREINNYHHAHDAYLNAVVGTALIKKYPKLESEFVYGDYKVYDVRKMIAKSEQEIGKATAKYFFYSNIMNFFKTEITLANGEIRKRPLIETNGETGEIVWDKGRDFATVRKVLSMPQVNIVKKTEVQTGGFSKESIRPKRNSDKLIARKKDWDPKKYGGFVSPTVAYSVLVVAKVEKGKSKKLKSVKELLGITIMERSSFEKNPIDFLEAKGYKEVKKDLIIKLPKYSLFELENGRKRMLASARFLQKGNELALPSKYVNFLYLASHYEKLKGSPEDNEQKQLFVEQHKHYLDEIIEQISEFSKRVILADANLDKVLSAYNKHRDKPIREQAENIIHLFTLTNLGAPRAFKYFDTTIDRKVYRSTKEVLDATLIHQSITGLYETRIDLSQLGGD

SEQ ID NO: 3706 - protein, 1368 aa, synthetic construct
MDKKYSIGLDIGTNSVGWAVITDEYKVPSKKFKVLGNTDRHSIKKNLIGALLFDSGETAEATRLKRTARRRYTRRKNRICYLQEIFSNEMAKVDDSFFHRLEESFLVEEDKKHERHPIFGNIVDEVAYHEKYPTIYHLRKKLVDSTDKADLRLIYLALAHMIKFRGHFLIEGDLNPDNSDVDKLFIQLVQTYNQLFEENPINASGVDAKAILSARLSKSRRLENLIAQLPGEKKNGLFGNLIALSLGLTPNFKSNFDLAEDAKLQLSKDTYDDDLDNLLAQIGDQYADLFLAAKNLSDAILLSDILRVNTEITKAPLSASMIKRYDEHHQDLTLLKALVRQQLPEKYKEIFFDQSKNGYAGYIDGGASQEEFYKFIKPILEKMDGTEELLVKLNREDLLRKQRTFDNGSIPHQIHLGELHAILRRQEDFYPFLKDNREKIEKILTFRIPYYVGPLARGNSRFAWMTRKSEETITPWNFEEVVDKGASAQSFIERMTNFDKNLPNEKVLPKHSLLYEYFTVYNELTKVKYVTEGMRKPAFLSGEQKKAIVDLLFKTNRKVTVKQLKEDYFKKIECFDSVEISGVEDRFNASLGTYHDLLKIIKDKDFLDNEENEDILEDIVLTLTLFEDREMIEERLKTYAHLFDDKVMKQLKRRRYTGWGRLSRKLINGIRDKQSGKTILDFLKSDGFANRNFMQLIHDDSLTFKEDIQKAQVSGQGDSLHEHIANLAGSPAIKKGILQTVKVVDELVKVMGRHKPENIVIEMARENQTTQKGQKNSRERMKRIEEGIKELGSQILKEHPVENTQLQNEKLYLYYLQNGRDMYVDQELDINRLSDYDVDHIVPQSFLKDDSIDNKVLTRSDKNRGKSDNVPSEEVVKKMKNYWRQLLNAKLITQRKFDNLTKAERGGLSELDKAGFIKRQLVETRQITKHVAQILDSRMNTKYDENDKLIREVKVITLKSKLVSDFRKDFQFYKVREINNYHHAHDAYLNAVVGTALIKKYPKLESEFVYGDYKVYDVRKMIAKSEQEIGKATAKYFFYSNIMNFFKTEITLANGEIRKRPLIETNGETGEIVWDKGRDFATVRKVLSMPQVNIVKKTEVQTGGFSKESILPKRNSDKLIARKKDWDPKKYGGFVSPTVAYSVLVVAKVEKGKSKKLKSVKELLGITIMERSSFEKNPIDFLEAKGYKEVKKDLIIKLPKYSLFELENGRKRMLASARELQKGNELALPSKYVNFLYLASHYEKLKGSPEDNEQKQLFVEQHKHYLDEIIEQISEFSKRVILADANLDKVLSAYNKHRDKPIREQAENIIHLFTLTNLGAPAAFKYFDTTIDRKQYRSTKEVLDATLIHQSITGLYETRIDLSQLGGD

SEQ ID NO: 3707 - protein, 1368 aa, synthetic construct
MDKKYSIGLDIGTNSVGWAVITDEYKVPSKKFKVLGNTDRHSIKKNLIGALLFDSGETAEATRLKRTARRRYTRRKNRICYLQEIFSNEMAKVDDSFFHRLEESFLVEEDKKHERHPIFGNIVDEVAYHEKYPTIYHLRKKLVDSTDKADLRLIYLALAHMIKFRGHFLIEGDLNPDNSDVDKLFIQLVQTYNQLFEENPINASGVDAKAILSARLSKSRRLENLIAQLPGEKKNGLFGNLIALSLGLTPNFKSNFDLAEDAKLQLSKDTYDDDLDNLLAQIGDQYADLFLAAKNLSDAILLSDILRVNTEITKAPLSASMIKRYDEHHQDLTLLKALVRQQLPEKYKEIFFDQSKNGYAGYIDGGASQEEFYKFIKPILEKMDGTEELLVKLNREDLLRKQRTFDNGSIPHQIHLGELHAILRRQEDFYPFLKDNREKIEKILTFRIPYYVGPLARGNSRFAWMTRKSEETITPWNFEEVVDKGASAQSFIERMTNFDKNLPNEKVLPKHSLLYEYFTVYNELTKVKYVTEGMRKPAFLSGEQKKAIVDLLFKTNRKVTVKQLKEDYFKKIECFDSVEISGVEDRFNASLGTYHDLLKIIKDKDFLDNEENEDILEDIVLTLTLFEDREMIEERLKTYAHLFDDKVMKQLKRRRYTGWGRLSRKLINGIRDKQSGKTILDFLKSDGFANRNFMQLIHDDSLTFKEDIQKAQVSGQGDSLHEHIANLAGSPAIKKGILQTVKVVDELVKVMGRHKPENIVIEMARENQTTQKGQKNSRERMKRIEEGIKELGSQILKEHPVENTQLQNEKLYLYYLQNGRDMYVDQELDINRLSDYDVDAIVPQSFLKDDSIDNKVLTRSDKNRGKSDNVPSEEVVKKMKNYWRQLLNAKLITQRKFDNLTKAERGGLSELDKAGFIKRQLVETRQITKHVAQILDSRMNTKYDENDKLIREVKVITLKSKLVSDFRKDFQFYKVREINNYHHAHDAYLNAVVGTALIKKYPKLESEFVYGDYKVYDVRKMIAKSEQEIGKATAKYFFYSNIMNFFKTEITLANGEIRKRPLIETNGETGEIVWDKGRDFATVRKVLSMPQVNIVKKTEVQTGGFSKESILPKRNSDKLIARKKDWDPKKYGGFVSPTVAYSVLVVAKVEKGKSKKLKSVKELLGITIMERSSFEKNPIDFLEAKGYKEVKKDLIIKLPKYSLFELENGRKRMLASARELQKGNELALPSKYVNFLYLASHYEKLKGSPEDNEQKQLFVEQHKHYLDEIIEQISEFSKRVILADANLDKVLSAYNKHRDKPIREQAENIIHLFTLTNLGAPAAFKYFDTTIDRKQYRSTKEVLDATLIHQSITGLYETRIDLSQLGGD

SEQ ID NO: 3708 - protein, 1367 aa, synthetic construct
DKKYSIGLDIGTNSVGWAVITDEYKVPSKKFKVLGNTDRHSIKKNLIGALLFDSGETAEATRLKRTARRRYTRRKNRICYLQEIFSNEMAKVDDSFFHRLEESFLVEEDKKHERHPIFGNIVDEVAYHEKYPTIYHLRKKLVDSTDKADLRLIYLALAHMIKFRGHFLIEGDLNPDNSDVDKLFIQLVQTYNQLFEENPINASGVDAKAILSARLSKSRRLENLIAQLPGEKKNGLFGNLIALSLGLTPNFKSNFDLAEDAKLQLSKDTYDDDLDNLLAQIGDQYADLFLAAKNLSDAILLSDILRVNTEITKAPLSASMIKRYDEHHQDLTLLKALVRQQLPEKYKEIFFDQSKNGYAGYIDGGASQEEFYKFIKPILEKMDGTEELLVKLNREDLLRKQRTFDNGSIPHQIHLGELHAILRRQEDFYPFLKDNREKIEKILTFRIPYYVGPLARGNSRFAWMTRKSEETITPWNFEEVVDKGASAQSFIERMTNFDKNLPNEKVLPKHSLLYEYFTVYNELTKVKYVTEGMRKPAFLSGEQKKAIVDLLFKTNRKVTVKQLKEDYFKKIECFDSVEISGVEDRFNASLGTYHDLLKIIKDKDFLDNEENEDILEDIVLTLTLFEDREMIEERLKTYAHLFDDKVMKQLKRRRYTGWGRLSRKLINGIRDKQSGKTILDFLKSDGFANRNFMQLIHDDSLTFKEDIQKAQVSGQGDSLHEHIANLAGSPAIKKGILQTVKVVDELVKVMGRHKPENIVIEMARENQTTQKGQKNSRERMKRIEEGIKELGSQILKEHPVENTQLQNEKLYLYYLQNGRDMYVDQELDINRLSDYDVDAIVPQSFLKDDSIDNKVLTRSDKNRGKSDNVPSEEVVKKMKNYWRQLLNAKLITQRKFDNLTKAERGGLSELDKAGFIKRQLVETRQITKHVAQILDSRMNTKYDENDKLIREVKVITLKSKLVSDFRKDFQFYKVREINNYHHAHDAYLNAVVGTALIKKYPKLESEFVYGDYKVYDVRKMIAKSEQEIGKATAKYFFYSNIMNFFKTEITLANGEIRKRPLIETNGETGEIVWDKGRDFATVRKVLSMPQVNIVKKTEVQTGGFSKESILPKRNSDKLIARKKDWDPKKYGGFVSPTVAYSVLVVAKVEKGKSKKLKSVKELLGITIMERSSFEKNPIDFLEAKGYKEVKKDLIIKLPKYSLFELENGRKRMLASARELQKGNELALPSKYVNFLYLASHYEKLKGSPEDNEQKQLFVEQHKHYLDEIIEQISEFSKRVILADANLDKVLSAYNKHRDKPIREQAENIIHLFTLTNLGAPAAFKYFDTTIDRKQYRSTKEVLDATLIHQSITGLYETRIDLSQLGGD

SEQ ID NO: 3709 - protein, 1368 aa, synthetic construct
MDKKYSIGLDIGTNSVGWAVITDEYKVPSKKFKVLGNTDRHSIKKNLIGALLFDSGETAERTRLKRTARRRYTRRKNRICYLQEIFSNEMAKVDDSFFHRLEESFLVEEDKKHERHPIFGNIVDEVAYHEKYPTIYHLRKKLVDSTDKADLRLIYLALAHMIKFRGHFLIEGDLNPDNSDVDKLFIQLVQTYNQLFEENPINASGVDAKAILSARLSKSRRLENLIAQLPGEKKNGLFGNLIALSLGLTPNFKSNFDLAEDAKLQLSKDTYDDDLDNLLAQIGDQYADLFLAAKNLSDAILLSDILRVNTEITKAPLSASMIKRYDEHHQDLTLLKALVRQQLPEKYKEIFFDQSKNGYAGYIDGGASQEEFYKFIKPILEKMDGTEELLVKLNREDLLRKQRTFDNGSIPHQIHLGELHAILRRQEDFYPFLKDNREKIEKILTFRIPYYVGPLARGNSRFAWMTRKSEETITPWNFEEVVDKGASAQSFIERMTNFDKNLPNEKVLPKHSLLYEYFTVYNELTKVKYVTEGMRKPAFLSGEQKKAIVDLLFKTNRKVTVKQLKEDYFKKIECFDSVEISGVEDRFNASLGTYHDLLKIIKDKDFLDNEENEDILEDIVLTLTLFEDREMIEERLKTYAHLFDDKVMKQLKRRRYTGWGRLSRKLINGIRDKQSGKTILDFLKSDGFANRNFMQLIHDDSLTFKEDIQKAQVSGQGDSLHEHIANLAGSPAIKKGILQTVKVVDELVKVMGRHKPENIVIEMARENQTTQKGQKNSRERMKRIEEGIKELGSQILKEHPVENTQLQNEKLYLYYLQNGRDMYVDQELDINRLSDYDVDHIVPQSFLKDDSIDNKVLTRSDKNRGKSDNVPSEEVVKKMKNYWRQLLNAKLITQRKFDNLTKAERGGLSELDKAGFIKRQLVETRQITKHVAQILDSRMNTKYDENDKLIREVKVITLKSKLVSDFRKDFQFYKVREINNYHHAHDAYLNAVVGTALIKKYPKLESEFVYGDYKVYDVRKMIAKSEQEIGKATAKYFFYSNIMNFFKTEITLANGEIRKRPLIETNGETGEIVWDKGRDFATVRKVLSMPQVNIVKKTEVQTGGFSKESIRPKRNSDKLIARKKDWDPKKYGGFLWPTVAYSVLVVAKVEKGKSKKLKSVKELLGITIMERSSFEKNPIDFLEAKGYKEVKKDLIIKLPKYSLFELENGRKRMLASAKQLQKGNELALPSKYVNFLYLASHYEKLKGSPEDNEQKQLFVEQHKHYLDEIIEQISEFSKRVILADANLDKVLSAYNKHRDKPIREQAENIIHLFTLTRLGAPRAFKYFDTTIDPKQYRSTKEVLDATLIHQSITGLYETRIDLSQLGGD

SEQ ID NO: 3710 - protein, 1368 aa, synthetic construct
MDKKYSIGLDIGTNSVGWAVITDEYKVPSKKFKVLGNTDRHSIKKNLIGALLFDSGETAERTRLKRTARRRYTRRKNRICYLQEIFSNEMAKVDDSFFHRLEESFLVEEDKKHERHPIFGNIVDEVAYHEKYPTIYHLRKKLVDSTDKADLRLIYLALAHMIKFRGHFLIEGDLNPDNSDVDKLFIQLVQTYNQLFEENPINASGVDAKAILSARLSKSRRLENLIAQLPGEKKNGLFGNLIALSLGLTPNFKSNFDLAEDAKLQLSKDTYDDDLDNLLAQIGDQYADLFLAAKNLSDAILLSDILRVNTEITKAPLSASMIKRYDEHHQDLTLLKALVRQQLPEKYKEIFFDQSKNGYAGYIDGGASQEEFYKFIKPILEKMDGTEELLVKLNREDLLRKQRTFDNGSIPHQIHLGELHAILRRQEDFYPFLKDNREKIEKILTFRIPYYVGPLARGNSRFAWMTRKSEETITPWNFEEVVDKGASAQSFIERMTNFDKNLPNEKVLPKHSLLYEYFTVYNELTKVKYVTEGMRKPAFLSGEQKKAIVDLLFKTNRKVTVKQLKEDYFKKIECFDSVEISGVEDRFNASLGTYHDLLKIIKDKDFLDNEENEDILEDIVLTLTLFEDREMIEERLKTYAHLFDDKVMKQLKRRRYTGWGRLSRKLINGIRDKQSGKTILDFLKSDGFANRNFMQLIHDDSLTFKEDIQKAQVSGQGDSLHEHIANLAGSPAIKKGILQTVKVVDELVKVMGRHKPENIVIEMARENQTTQKGQKNSRERMKRIEEGIKELGSQILKEHPVENTQLQNEKLYLYYLQNGRDMYVDQELDINRLSDYDVDAIVPQSFLKDDSIDNKVLTRSDKNRGKSDNVPSEEVVKKMKNYWRQLLNAKLITQRKFDNLTKAERGGLSELDKAGFIKRQLVETRQITKHVAQILDSRMNTKYDENDKLIREVKVITLKSKLVSDFRKDFQFYKVREINNYHHAHDAYLNAVVGTALIKKYPKLESEFVYGDYKVYDVRKMIAKSEQEIGKATAKYFFYSNIMNFFKTEITLANGEIRKRPLIETNGETGEIVWDKGRDFATVRKVLSMPQVNIVKKTEVQTGGFSKESIRPKRNSDKLIARKKDWDPKKYGGFLWPTVAYSVLVVAKVEKGKSKKLKSVKELLGITIMERSSFEKNPIDFLEAKGYKEVKKDLIIKLPKYSLFELENGRKRMLASAKQLQKGNELALPSKYVNFLYLASHYEKLKGSPEDNEQKQLFVEQHKHYLDEIIEQISEFSKRVILADANLDKVLSAYNKHRDKPIREQAENIIHLFTLTRLGAPRAFKYFDTTIDPKQYRSTKEVLDATLIHQSITGLYETRIDLSQLGGD

SEQ ID NO: 3711 - protein, 1367 aa, synthetic construct
DKKYSIGLDIGTNSVGWAVITDEYKVPSKKFKVLGNTDRHSIKKNLIGALLFDSGETAERTRLKRTARRRYTRRKNRICYLQEIFSNEMAKVDDSFFHRLEESFLVEEDKKHERHPIFGNIVDEVAYHEKYPTIYHLRKKLVDSTDKADLRLIYLALAHMIKFRGHFLIEGDLNPDNSDVDKLFIQLVQTYNQLFEENPINASGVDAKAILSARLSKSRRLENLIAQLPGEKKNGLFGNLIALSLGLTPNFKSNFDLAEDAKLQLSKDTYDDDLDNLLAQIGDQYADLFLAAKNLSDAILLSDILRVNTEITKAPLSASMIKRYDEHHQDLTLLKALVRQQLPEKYKEIFFDQSKNGYAGYIDGGASQEEFYKFIKPILEKMDGTEELLVKLNREDLLRKQRTFDNGSIPHQIHLGELHAILRRQEDFYPFLKDNREKIEKILTFRIPYYVGPLARGNSRFAWMTRKSEETITPWNFEEVVDKGASAQSFIERMTNFDKNLPNEKVLPKHSLLYEYFTVYNELTKVKYVTEGMRKPAFLSGEQKKAIVDLLFKTNRKVTVKQLKEDYFKKIECFDSVEISGVEDRFNASLGTYHDLLKIIKDKDFLDNEENEDILEDIVLTLTLFEDREMIEERLKTYAHLFDDKVMKQLKRRRYTGWGRLSRKLINGIRDKQSGKTILDFLKSDGFANRNFMQLIHDDSLTFKEDIQKAQVSGQGDSLHEHIANLAGSPAIKKGILQTVKVVDELVKVMGRHKPENIVIEMARENQTTQKGQKNSRERMKRIEEGIKELGSQILKEHPVENTQLQNEKLYLYYLQNGRDMYVDQELDINRLSDYDVDAIVPQSFLKDDSIDNKVLTRSDKNRGKSDNVPSEEVVKKMKNYWRQLLNAKLITQRKFDNLTKAERGGLSELDKAGFIKRQLVETRQITKHVAQILDSRMNTKYDENDKLIREVKVITLKSKLVSDFRKDFQFYKVREINNYHHAHDAYLNAVVGTALIKKYPKLESEFVYGDYKVYDVRKMIAKSEQEIGKATAKYFFYSNIMNFFKTEITLANGEIRKRPLIETNGETGEIVWDKGRDFATVRKVLSMPQVNIVKKTEVQTGGFSKESIRPKRNSDKLIARKKDWDPKKYGGFLWPTVAYSVLVVAKVEKGKSKKLKSVKELLGITIMERSSFEKNPIDFLEAKGYKEVKKDLIIKLPKYSLFELENGRKRMLASAKQLQKGNELALPSKYVNFLYLASHYEKLKGSPEDNEQKQLFVEQHKHYLDEIIEQISEFSKRVILADANLDKVLSAYNKHRDKPIREQAENIIHLFTLTRLGAPRAFKYFDTTIDPKQYRSTKEVLDATLIHQSITGLYETRIDLSQLGGD

SEQ ID NO: 3712 - protein, 1057 aa, synthetic construct
MNQKFILGLDIGITSVGYGLIDYETKNIIDAGVRLFPEANVENNEGRRSKRGSRRLKRRRIHRLERVKLLLTEYDLINKEQIPTSNNPYQIRVKGLSEILSKDELAIALLHLAKRRGIHNVDVAADKEETASDSLSTKDQINKNAKFLESRYVCELQKERLENEGHVRGVENRFLTKDIVREAKKIIDTQMQYYPEIDETFKEKYISLVETRREYFEGPGQGSPFGWNGDLKKWYEMLMGHCTYFPQELRSVKYAYSADLFNALNDLNNLIIQRDNSEKLEYHEKYHIIENVFKQKKKPTLKQIAKEIGVNPEDIKGYRITKSGTPEFTSFKLFHDLKKVVKDHAILDDIDLLNQIAEILTIYQDKDSIVAELGQLEYLMSEADKQSISELTGYTGTHSLSLKCMNMIIDELWHSSMNQMEVFTYLNMRPKKYELKGYQRIPTDMIDDAILSPVVKRTFIQSINVINKVIEKYGIPEDIIIELARENNSDDRKKFINNLQKKNEATRKRINEIIGQTGNQNAKRIVEKIRLHDQQEGKCLYSLESIPLEDLLNNPNHYEVDHIIPRSVSFDNSYHNKVLVKQSENSKKSNLTPYQYFNSGKSKLSYNQFKQHILNLSKSQDRISKKKKEYLLEERDINKFEVQKEFINRNLVDTRYATRELTNYLKAYFSANNMNVKVKTINGSFTDYLRKVWKFKKERNHGYKHHAEDALIIANADFLFKENKKLKAVNSVLEKPEIETKQLDIQVDSEDNYSEMFIIPKQVQDIKDFRNFKYSHRVDKKPNRQLINDTLYSTRKKDNSTYIVQTIKDIYAKDNTTLKKQFDKSPEKFLMYQHDPRTFEKLEVIMKQYANEKNPLAKYHEETGEYLTKYSKKNNGPIVKSLKYIGNKLGSHLDVTHQFKSSTKKLVKLSIKNYRFDVYLTEKGYKFVTIAYLNVFKKDNYYYIPKDKYQELKEKKKIKDTDQFIASFYKNDLIKLNGDLYKIIGVNSDDRNIIELDYYDIKYKDYCEINNIKGEPRIKKTIGKKTESIEKFTTDVLGNLYLHSTEKAPQLIFKRGL

SEQ ID NO: 3713 - protein, 1057 aa, synthetic construct
MNQKFILGLDIGITSVGYGLIDYETKNIIDAGVRLFPEANVENNEGRRSKRGSRRLKRRRIHRLERVKLLLTEYDLINKEQIPTSNNPYQIRVKGLSEILSKDELAIALLHLAKRRGIHNVDVAADKEETASDSLSTKDQINKNAKFLESRYVCELQKERLENEGHVRGVENRFLTKDIVREAKKIIDTQMQYYPEIDETFKEKYISLVETRREYFEGPGQGSPFGWNGDLKKWYEMLMGHCTYFPQELRSVKYAYSADLFNALNDLNNLIIQRDNSEKLEYHEKYHIIENVFKQKKKPTLKQIAKEIGVNPEDIKGYRITKSGTPEFTSFKLFHDLKKVVKDHAILDDIDLLNQIAEILTIYQDKDSIVAELGQLEYLMSEADKQSISELTGYTGTHSLSLKCMNMIIDELWHSSMNQMEVFTYLNMRPKKYELKGYQRIPTDMIDDAILSPVVKRTFIQSINVINKVIEKYGIPEDIIIELARENNSDDRKKFINNLQKKNEATRKRINEIIGQTGNQNAKRIVEKIRLHDQQEGKCLYSLESIPLEDLLNNPNHYEVDHIIPRSVSFDNSYHNKVLVKQSEASKKSNLTPYQYFNSGKSKLSYNQFKQHILNLSKSQDRISKKKKEYLLEERDINKFEVQKEFINRNLVDTRYATRELTNYLKAYFSANNMNVKVKTINGSFTDYLRKVWKFKKERNHGYKHHAEDALIIANADFLFKENKKLKAVNSVLEKPEIETKQLDIQVDSEDNYSEMFIIPKQVQDIKDFRNFKYSHRVDKKPNRQLINDTLYSTRKKDNSTYIVQTIKDIYAKDNTTLKKQFDKSPEKFLMYQHDPRTFEKLEVIMKQYANEKNPLAKYHEETGEYLTKYSKKNNGPIVKSLKYIGNKLGSHLDVTHQFKSSTKKLVKLSIKNYRFDVYLTEKGYKFVTIAYLNVFKKDNYYYIPKDKYQELKEKKKIKDTDQFIASFYKNDLIKLNGDLYKIIGVNSDDRNIIELDYYDIKYKDYCEINNIKGEPRIKKTIGKKTESIEKFTTDVLGNLYLHSTEKAPQLIFKRGL

SEQ ID NO: 3714 - protein, 1056 aa, synthetic construct
NQKFILGLDIGITSVGYGLIDYETKNIIDAGVRLFPEANVENNEGRRSKRGSRRLKRRRIHRLERVKLLLTEYDLINKEQIPTSNNPYQIRVKGLSEILSKDELAIALLHLAKRRGIHNVDVAADKEETASDSLSTKDQINKNAKFLESRYVCELQKERLENEGHVRGVENRFLTKDIVREAKKIIDTQMQYYPEIDETFKEKYISLVETRREYFEGPGQGSPFGWNGDLKKWYEMLMGHCTYFPQELRSVKYAYSADLFNALNDLNNLIIQRDNSEKLEYHEKYHIIENVFKQKKKPTLKQIAKEIGVNPEDIKGYRITKSGTPEFTSFKLFHDLKKVVKDHAILDDIDLLNQIAEILTIYQDKDSIVAELGQLEYLMSEADKQSISELTGYTGTHSLSLKCMNMIIDELWHSSMNQMEVFTYLNMRPKKYELKGYQRIPTDMIDDAILSPVVKRTFIQSINVINKVIEKYGIPEDIIIELARENNSDDRKKFINNLQKKNEATRKRINEIIGQTGNQNAKRIVEKIRLHDQQEGKCLYSLESIPLEDLLNNPNHYEVDHIIPRSVSFDNSYHNKVLVKQSEASKKSNLTPYQYFNSGKSKLSYNQFKQHILNLSKSQDRISKKKKEYLLEERDINKFEVQKEFINRNLVDTRYATRELTNYLKAYFSANNMNVKVKTINGSFTDYLRKVWKFKKERNHGYKHHAEDALIIANADFLFKENKKLKAVNSVLEKPEIETKQLDIQVDSEDNYSEMFIIPKQVQDIKDFRNFKYSHRVDKKPNRQLINDTLYSTRKKDNSTYIVQTIKDIYAKDNTTLKKQFDKSPEKFLMYQHDPRTFEKLEVIMKQYANEKNPLAKYHEETGEYLTKYSKKNNGPIVKSLKYIGNKLGSHLDVTHQFKSSTKKLVKLSIKNYRFDVYLTEKGYKFVTIAYLNVFKKDNYYYIPKDKYQELKEKKKIKDTDQFIASFYKNDLIKLNGDLYKIIGVNSDDRNIIELDYYDIKYKDYCEINNIKGEPRIKKTIGKKTESIEKFTTDVLGNLYLHSTEKAPQLIFKRGL

SEQ ID NO: 3715 - protein, 1057 aa, synthetic construct
MNQKFILGLDIGITSVGYGLIDYETKNIIDAGVRLFPEANVENNEGRRSKRGSRRLKRRRIHRLERVKLLLTEYDLINKEQIPTSNNPYQIRVKGLSEILSKDELAIALLHLAKRRGIHNVDVAADKEETASDSLSTKDQINKNAKFLESRYVCELQKERLENEGHVRGVENRFLTKDIVREAKKIIDTQMQYYPEIDETFKEKYISLVETRREYFEGPGQGSPFGWNGDLKKWYEMLMGHCTYFPQELRSVKYAYSADLFNALNDLNNLIIQRDNSEKLEYHEKYHIIENVFKQKKKPTLKQIAKEIGVNPEDIKGYRITKSGTPEFTSFKLFHDLKKVVKDHAILDDIDLLNQIAEILTIYQDKDSIVAELGQLEYLMSEADKQSISELTGYTGTHSLSLKCMNMIIDELWHSSMNQMEVFTYLNMRPKKYELKGYQRIPTDMIDDAILSPVVKRTFIQSINVINKVIEKYGIPEDIIIELARENNSDDRKKFINNLQKKNEATRKRINEIIGQTGNQNAKRIVEKIRLHDQQEGKCLYSLESIPLEDLLNNPNHYEVDHIIPRSVSFDNSYHNKVLVKQSENSKKSNLTPYQYFNSGKSKLSYNQFKQHILNLSKSQDRISKKKKEYLLEERDINKFEVQKEFINRNLVDTRYATRELTSYLKAYFSANNMDVKVKTINGSFTNHLRKVWRFDKYRNHGYKHHAEDALIIANADFLFKENKKLQNTNKILEKPTIENNTKKVTVEKEEDYNNVFETPKLVEDIKQYRDYKFSHRVDKKPNRQLINDTLYSTRMKDEHDYIVQTITDIYGKDNTNLKKQFNKNPEKFLMYQNDPKTFEKLSIIMKQYSDEKNPLAKYYEETGEYLTKYSKKNNGPIVKKIKLLGNKVGNHLDVTNKYENSTKKLVKLSIKNYRFDVYLTEKGYKFVTIAYLNVFKKDNYYYIPKDKYQELKEKKKIKDTDQFIASFYKNDLIKLNGDLYKIIGVNSDDRNIIELDYYDIKYKDYCEINNIKGEPRIKKTIGKKTESIEKFTTDVLGNLYLHSTEKAPQLIFKRGL

SEQ ID NO: 3716 - protein, 1057 aa, synthetic construct
MNQKFILGLDIGITSVGYGLIDYETKNIIDAGVRLFPEANVENNEGRRSKRGSRRLKRRRIHRLERVKLLLTEYDLINKEQIPTSNNPYQIRVKGLSEILSKDELAIALLHLAKRRGIHNVDVAADKEETASDSLSTKDQINKNAKFLESRYVCELQKERLENEGHVRGVENRFLTKDIVREAKKIIDTQMQYYPEIDETFKEKYISLVETRREYFEGPGQGSPFGWNGDLKKWYEMLMGHCTYFPQELRSVKYAYSADLFNALNDLNNLIIQRDNSEKLEYHEKYHIIENVFKQKKKPTLKQIAKEIGVNPEDIKGYRITKSGTPEFTSFKLFHDLKKVVKDHAILDDIDLLNQIAEILTIYQDKDSIVAELGQLEYLMSEADKQSISELTGYTGTHSLSLKCMNMIIDELWHSSMNQMEVFTYLNMRPKKYELKGYQRIPTDMIDDAILSPVVKRTFIQSINVINKVIEKYGIPEDIIIELARENNSDDRKKFINNLQKKNEATRKRINEIIGQTGNQNAKRIVEKIRLHDQQEGKCLYSLESIPLEDLLNNPNHYEVDHIIPRSVSFDNSYHNKVLVKQSEASKKSNLTPYQYFNSGKSKLSYNQFKQHILNLSKSQDRISKKKKEYLLEERDINKFEVQKEFINRNLVDTRYATRELTSYLKAYFSANNMDVKVKTINGSFTNHLRKVWRFDKYRNHGYKHHAEDALIIANADFLFKENKKLQNTNKILEKPTIENNTKKVTVEKEEDYNNVFETPKLVEDIKQYRDYKFSHRVDKKPNRQLINDTLYSTRMKDEHDYIVQTITDIYGKDNTNLKKQFNKNPEKFLMYQNDPKTFEKLSIIMKQYSDEKNPLAKYYEETGEYLTKYSKKNNGPIVKKIKLLGNKVGNHLDVTNKYENSTKKLVKLSIKNYRFDVYLTEKGYKFVTIAYLNVFKKDNYYYIPKDKYQELKEKKKIKDTDQFIASFYKNDLIKLNGDLYKIIGVNSDDRNIIELDYYDIKYKDYCEINNIKGEPRIKKTIGKKTESIEKFTTDVLGNLYLHSTEKAPQLIFKRGL

SEQ ID NO: 3717 - protein, 1056 aa, synthetic construct
NQKFILGLDIGITSVGYGLIDYETKNIIDAGVRLFPEANVENNEGRRSKRGSRRLKRRRIHRLERVKLLLTEYDLINKEQIPTSNNPYQIRVKGLSEILSKDELAIALLHLAKRRGIHNVDVAADKEETASDSLSTKDQINKNAKFLESRYVCELQKERLENEGHVRGVENRFLTKDIVREAKKIIDTQMQYYPEIDETFKEKYISLVETRREYFEGPGQGSPFGWNGDLKKWYEMLMGHCTYFPQELRSVKYAYSADLFNALNDLNNLIIQRDNSEKLEYHEKYHIIENVFKQKKKPTLKQIAKEIGVNPEDIKGYRITKSGTPEFTSFKLFHDLKKVVKDHAILDDIDLLNQIAEILTIYQDKDSIVAELGQLEYLMSEADKQSISELTGYTGTHSLSLKCMNMIIDELWHSSMNQMEVFTYLNMRPKKYELKGYQRIPTDMIDDAILSPVVKRTFIQSINVINKVIEKYGIPEDIIIELARENNSDDRKKFINNLQKKNEATRKRINEIIGQTGNQNAKRIVEKIRLHDQQEGKCLYSLESIPLEDLLNNPNHYEVDHIIPRSVSFDNSYHNKVLVKQSEASKKSNLTPYQYFNSGKSKLSYNQFKQHILNLSKSQDRISKKKKEYLLEERDINKFEVQKEFINRNLVDTRYATRELTSYLKAYFSANNMDVKVKTINGSFTNHLRKVWRFDKYRNHGYKHHAEDALIIANADFLFKENKKLQNTNKILEKPTIENNTKKVTVEKEEDYNNVFETPKLVEDIKQYRDYKFSHRVDKKPNRQLINDTLYSTRMKDEHDYIVQTITDIYGKDNTNLKKQFNKNPEKFLMYQNDPKTFEKLSIIMKQYSDEKNPLAKYYEETGEYLTKYSKKNNGPIVKKIKLLGNKVGNHLDVTNKYENSTKKLVKLSIKNYRFDVYLTEKGYKFVTIAYLNVFKKDNYYYIPKDKYQELKEKKKIKDTDQFIASFYKNDLIKLNGDLYKIIGVNSDDRNIIELDYYDIKYKDYCEINNIKGEPRIKKTIGKKTESIEKFTTDVLGNLYLHSTEKAPQLIFKRGL

SEQ ID NO: 3718 - protein, 1368 aa, synthetic construct
MDKKYSIGLDIGTNSVGWAVITDEYKVPSKKFKVLGNTDRHSIKKNLIGALLFDSGETAEATRLKRTARRRYTRRKNRICYLQEIFSNEMAKVDDSFFHRLEESFLVEEDKKHERHPIFGNIVDEVAYHEKYPTIYHLRKKLVDSTDKADLRLIYLALAHMIKFRGHFLIEGDLNPDNSDVDKLFIQLVQTYNQLFEENPINASGVDAKAILSARLSKSRRLENLIAQLPGEKKNGLFGNLIALSLGLTPNFKSNFDLAEDAKLQLSKDTYDDDLDNLLAQIGDQYADLFLAAKNLSDAILLSDILRVNTEITKAPLSASMIKRYDEHHQDLTLLKALVRQQLPEKYKEIFFDQSKNGYAGYIDGGASQEEFYKFIKPILEKMDGTEELLVKLNREDLLRKQRTFDNGSIPHQIHLGELHAILRRQEDFYPFLKDNREKIEKILTFRIPYYVGPLARGNSRFAWMTRKSEETITPWNFEEVVDKGASAQSFIERMTNFDKNLPNEKVLPKHSLLYEYFTVYNELTKVKYVTEGMRKPAFLSGEQKKAIVDLLFKTNRKVTVKQLKEDYFKKIECFDSVEISGVEDRFNASLGTYHDLLKIIKDKDFLDNEENEDILEDIVLTLTLFEDREMIEERLKTYAHLFDDKVMKQLKRRRYTGWGRLSRKLINGIRDKQSGKTILDFLKSDGFANRNFMQLIHDDSLTFKEDIQKAQVSGQGDSLHEHIANLAGSPAIKKGILQTVKVVDELVKVMGRHKPENIVIEMARENQTTQKGQKNSRERMKRIEEGIKELGSQILKEHPVENTQLQNEKLYLYYLQNGRDMYVDQELDINRLSDYDVDHIVPQSFLKDDSIDNKVLTRSDKNRGKSDNVPSEEVVKKMKNYWRQLLNAKLITQRKFDNLTKAERGGLSELDKAGFIKRQLVETRQITKHVAQILDSRMNTKYDENDKLIREVKVITLKSKLVSDFRKDFQFYKVREINNYHHAHDAYLNAVVGTALIKKYPKLESEFVYGDYKVYDVRKMIAKSEQEIGKATAKYFFYSNIMNFFKTEITLANGEIRKRPLIETNGETGEIVWDKGRDFATVRKVLSMPQVNIVKKTEVQTGGFSKESILPKRNSDKLIARKKDWDPKKYGGFLWPTVAYSVLVVAKVEKGKSKKLKSVKELLGITIMERSSFEKNPIDFLEAKGYKEVKKDLIIKLPKYSLFELENGRKRMLASAKQLQKGNELALPSKYVNFLYLASHYEKLKGSPEDNEQKQLFVEQHKHYLDEIIEQISEFSKRVILADANLDKVLSAYNKHRDKPIREQAENIIHLFTLTNLGAPAAFKYFDTTIDRKQYRSTKEVLDATLIHQSITGLYETRIDLSQLGGD

SEQ ID NO: 3719 - protein, 1368 aa, synthetic construct
MDKKYSIGLDIGTNSVGWAVITDEYKVPSKKFKVLGNTDRHSIKKNLIGALLFDSGETAEATRLKRTARRRYTRRKNRICYLQEIFSNEMAKVDDSFFHRLEESFLVEEDKKHERHPIFGNIVDEVAYHEKYPTIYHLRKKLVDSTDKADLRLIYLALAHMIKFRGHFLIEGDLNPDNSDVDKLFIQLVQTYNQLFEENPINASGVDAKAILSARLSKSRRLENLIAQLPGEKKNGLFGNLIALSLGLTPNFKSNFDLAEDAKLQLSKDTYDDDLDNLLAQIGDQYADLFLAAKNLSDAILLSDILRVNTEITKAPLSASMIKRYDEHHQDLTLLKALVRQQLPEKYKEIFFDQSKNGYAGYIDGGASQEEFYKFIKPILEKMDGTEELLVKLNREDLLRKQRTFDNGSIPHQIHLGELHAILRRQEDFYPFLKDNREKIEKILTFRIPYYVGPLARGNSRFAWMTRKSEETITPWNFEEVVDKGASAQSFIERMTNFDKNLPNEKVLPKHSLLYEYFTVYNELTKVKYVTEGMRKPAFLSGEQKKAIVDLLFKTNRKVTVKQLKEDYFKKIECFDSVEISGVEDRFNASLGTYHDLLKIIKDKDFLDNEENEDILEDIVLTLTLFEDREMIEERLKTYAHLFDDKVMKQLKRRRYTGWGRLSRKLINGIRDKQSGKTILDFLKSDGFANRNFMQLIHDDSLTFKEDIQKAQVSGQGDSLHEHIANLAGSPAIKKGILQTVKVVDELVKVMGRHKPENIVIEMARENQTTQKGQKNSRERMKRIEEGIKELGSQILKEHPVENTQLQNEKLYLYYLQNGRDMYVDQELDINRLSDYDVDAIVPQSFLKDDSIDNKVLTRSDKNRGKSDNVPSEEVVKKMKNYWRQLLNAKLITQRKFDNLTKAERGGLSELDKAGFIKRQLVETRQITKHVAQILDSRMNTKYDENDKLIREVKVITLKSKLVSDFRKDFQFYKVREINNYHHAHDAYLNAVVGTALIKKYPKLESEFVYGDYKVYDVRKMIAKSEQEIGKATAKYFFYSNIMNFFKTEITLANGEIRKRPLIETNGETGEIVWDKGRDFATVRKVLSMPQVNIVKKTEVQTGGFSKESILPKRNSDKLIARKKDWDPKKYGGFLWPTVAYSVLVVAKVEKGKSKKLKSVKELLGITIMERSSFEKNPIDFLEAKGYKEVKKDLIIKLPKYSLFELENGRKRMLASAKQLQKGNELALPSKYVNFLYLASHYEKLKGSPEDNEQKQLFVEQHKHYLDEIIEQISEFSKRVILADANLDKVLSAYNKHRDKPIREQAENIIHLFTLTNLGAPAAFKYFDTTIDRKQYRSTKEVLDATLIHQSITGLYETRIDLSQLGGD

SEQ ID NO: 3720 - protein, 1367 aa, synthetic construct
DKKYSIGLDIGTNSVGWAVITDEYKVPSKKFKVLGNTDRHSIKKNLIGALLFDSGETAEATRLKRTARRRYTRRKNRICYLQEIFSNEMAKVDDSFFHRLEESFLVEEDKKHERHPIFGNIVDEVAYHEKYPTIYHLRKKLVDSTDKADLRLIYLALAHMIKFRGHFLIEGDLNPDNSDVDKLFIQLVQTYNQLFEENPINASGVDAKAILSARLSKSRRLENLIAQLPGEKKNGLFGNLIALSLGLTPNFKSNFDLAEDAKLQLSKDTYDDDLDNLLAQIGDQYADLFLAAKNLSDAILLSDILRVNTEITKAPLSASMIKRYDEHHQDLTLLKALVRQQLPEKYKEIFFDQSKNGYAGYIDGGASQEEFYKFIKPILEKMDGTEELLVKLNREDLLRKQRTFDNGSIPHQIHLGELHAILRRQEDFYPFLKDNREKIEKILTFRIPYYVGPLARGNSRFAWMTRKSEETITPWNFEEVVDKGASAQSFIERMTNFDKNLPNEKVLPKHSLLYEYFTVYNELTKVKYVTEGMRKPAFLSGEQKKAIVDLLFKTNRKVTVKQLKEDYFKKIECFDSVEISGVEDRFNASLGTYHDLLKIIKDKDFLDNEENEDILEDIVLTLTLFEDREMIEERLKTYAHLFDDKVMKQLKRRRYTGWGRLSRKLINGIRDKQSGKTILDFLKSDGFANRNFMQLIHDDSLTFKEDIQKAQVSGQGDSLHEHIANLAGSPAIKKGILQTVKVVDELVKVMGRHKPENIVIEMARENQTTQKGQKNSRERMKRIEEGIKELGSQILKEHPVENTQLQNEKLYLYYLQNGRDMYVDQELDINRLSDYDVDAIVPQSFLKDDSIDNKVLTRSDKNRGKSDNVPSEEVVKKMKNYWRQLLNAKLITQRKFDNLTKAERGGLSELDKAGFIKRQLVETRQITKHVAQILDSRMNTKYDENDKLIREVKVITLKSKLVSDFRKDFQFYKVREINNYHHAHDAYLNAVVGTALIKKYPKLESEFVYGDYKVYDVRKMIAKSEQEIGKATAKYFFYSNIMNFFKTEITLANGEIRKRPLIETNGETGEIVWDKGRDFATVRKVLSMPQVNIVKKTEVQTGGFSKESILPKRNSDKLIARKKDWDPKKYGGFLWPTVAYSVLVVAKVEKGKSKKLKSVKELLGITIMERSSFEKNPIDFLEAKGYKEVKKDLIIKLPKYSLFELENGRKRMLASAKQLQKGNELALPSKYVNFLYLASHYEKLKGSPEDNEQKQLFVEQHKHYLDEIIEQISEFSKRVILADANLDKVLSAYNKHRDKPIREQAENIIHLFTLTNLGAPAAFKYFDTTIDRKQYRSTKEVLDATLIHQSITGLYETRIDLSQLGGD

SEQ ID NO: 3721 - protein, 30 aa, synthetic construct
MDSLLMNRRKFLYQFKNVRWAKGRRETYLC

SEQ ID NO: 3722 - protein, 18 aa, synthetic construct
KRTADGSEFESPKKKRKV

SEQ ID NO: 3723 - protein, 17 aa, synthetic construct
KRTADGSEFEPKKKRKV

SEQ ID NO: 3724 - protein, 19 aa, synthetic construct
NLSKRPAAIKKAGQAKKKK

SEQ ID NO: 3725 - protein, 11 aa, synthetic construct
RQRRNELKRSF

SEQ ID NO: 3726 - protein, 38 aa, synthetic construct
NQSSNFGPMKGGNFGGRSSGPYGGGGQYFAKPRNQGGY

SEQ ID NO: 3727 - protein, 7 aa, synthetic construct
PKKKRKV

SEQ ID NO: 3728 - protein, 16 aa, synthetic construct
  VARIANT 3: note = Any amino acid
  VARIANT 4: note = Any amino acid
  VARIANT 5: note = Any amino acid
  VARIANT 6: note = Any amino acid
  VARIANT 7: note = Any amino acid
  VARIANT 8: note = Any amino acid
  VARIANT 9: note = Any amino acid
  VARIANT 10: note = Any amino acid
  VARIANT 11: note = Any amino acid
  VARIANT 12: note = Any amino acid
KRXXXXXXXXXXKKKL

SEQ ID NO: 3729 - protein, 16 aa, synthetic construct
KRPAATKKAGQAKKKK

SEQ ID NO: 3730 - protein, 19 aa, synthetic construct
MKRTADGSEFESPKKKRKV

SEQ ID NO: 3731 - protein, 20 aa, synthetic construct
AVKRPAATKKAGQAKKKKLD

SEQ ID NO: 3732 - protein, 25 aa, synthetic construct
MSRRRKANPTKLSENAKKLAKEVEN

SEQ ID NO: 3733 - protein, 9 aa, synthetic construct
PAAKRVKLD

SEQ ID NO: 3734 - protein, 9 aa, synthetic construct
KLKIKRPVK

SEQ ID NO: 3735 - protein, 8 aa, synthetic construct
VSRKRPRP

SEQ ID NO: 3736 - protein, 10 aa, synthetic construct
EGAPPAKRAR

SEQ ID NO: 3737 - protein, 16 aa, synthetic construct
RQARRNRRRRWRERNR

SEQ ID NO: 3738 - protein, 12 aa, synthetic construct
PPQPKKKPLDGE

SEQ ID NO: 3739 - protein, 21 aa, synthetic construct
SGGSKRTADGSEFEPKKKRKV

SEQ ID NO: 3740 - protein, 2117 aa, synthetic construct
MKRTADGSEFESPKKKRKVDKKYSIGLDIGTNSVGWAVITDEYKVPSKKFKVLGNTDRHSIKKNLIGALLFDSGETAEATRLKRTARRRYTRRKNRICYLQEIFSNEMAKVDDSFFHRLEESFLVEEDKKHERHPIFGNIVDEVAYHEKYPTIYHLRKKLVDSTDKADLRLIYLALAHMIKFRGHFLIEGDLNPDNSDVDKLFIQLVQTYNQLFEENPINASGVDAKAILSARLSKSRRLENLIAQLPGEKKNGLFGNLIALSLGLTPNFKSNFDLAEDAKLQLSKDTYDDDLDNLLAQIGDQYADLFLAAKNLSDAILLSDILRVNTEITKAPLSASMIKRYDEHHQDLTLLKALVRQQLPEKYKEIFFDQSKNGYAGYIDGGASQEEFYKFIKPILEKMDGTEELLVKLNREDLLRKQRTFDNGSIPHQIHLGELHAILRRQEDFYPFLKDNREKIEKILTFRIPYYVGPLARGNSRFAWMTRKSEETITPWNFEEVVDKGASAQSFIERMTNFDKNLPNEKVLPKHSLLYEYFTVYNELTKVKYVTEGMRKPAFLSGEQKKAIVDLLFKTNRKVTVKQLKEDYFKKIECFDSVEISGVEDRFNASLGTYHDLLKIIKDKDFLDNEENEDILEDIVLTLTLFEDREMIEERLKTYAHLFDDKVMKQLKRRRYTGWGRLSRKLINGIRDKQSGKTILDFLKSDGFANRNFMQLIHDDSLTFKEDIQKAQVSGQGDSLHEHIANLAGSPAIKKGILQTVKVVDELVKVMGRHKPENIVIEMARENQTTQKGQKNSRERMKRIEEGIKELGSQILKEHPVENTQLQNEKLYLYYLQNGRDMYVDQELDINRLSDYDVDAIVPQSFLKDDSIDNKVLTRSDKNRGKSDNVPSEEVVKKMKNYWRQLLNAKLITQRKFDNLTKAERGGLSELDKAGFIKRQLVETRQITKHVAQILDSRMNTKYDENDKLIREVKVITLKSKLVSDFRKDFQFYKVREINNYHHAHDAYLNAVVGTALIKKYPKLESEFVYGDYKVYDVRKMIAKSEQEIGKATAKYFFYSNIMNFFKTEITLANGEIRKRPLIETNGETGEIVWDKGRDFATVRKVLSMPQVNIVKKTEVQTGGFSKESILPKRNSDKLIARKKDWDPKKYGGFDSPTVAYSVLVVAKVEKGKSKKLKSVKELLGITIMERSSFEKNPIDFLEAKGYKEVKKDLIIKLPKYSLFELENGRKRMLASAGELQKGNELALPSKYVNFLYLASHYEKLKGSPEDNEQKQLFVEQHKHYLDEIIEQISEFSKRVILADANLDKVLSAYNKHRDKPIREQAENIIHLFTLTNLGAPAAFKYFDTTIDRKRYTSTKEVLDATLIHQSITGLYETRIDLSQLGGDSGGSSGGSSGSETPGTSESATPESSGGSSGGSSTLNIEDEYRLHETSKEPDVSLGSTWLSDFPQAWAETGGMGLAVRQAPLIIPLKATSTPVSIKQYPMSQEARLGIKPHIQRLLDQGILVPCQSPWNTPLLPVKKPGTNDYRPVQDLREVNKRVEDIHPTVPNPYNLLSGLPPSHQWYTVLDLKDAFFCLRLHPTSQPLFAFEWRDPEMGISGQLTWTRLPQGFKNSPTLFNEALHRDLADFRIQHPDLILLQYVDDLLLAATSELDCQQGTRALLQTLGNLGYRASAKKAQICQKQVKYLGYLLKEGQRWLTEARKETVMGQPTPKTPRQLREFLGKAGFCRLFIPGFAEMAAPLYPLTKPGTLFNWGPDQQKAYQEIKQALLTAPALGLPDLTKPFELFVDEKQGYAKGVLTQKLGPWRRPVAYLSKKLDPVAAGWPPCLRMVAAIAVLTKDAGKLTMGQPLVILAPHAVEALVKQPPDRWLSNARMTHYQALLLDTDRVQFGPVVALNPATLLPLPEEGLQHNCLDILAEAHGTRPDLTDQPLPDADHTWYTDGSSLLQEGQRKAGAAVTTETEVIWAKALPAGTSAQRAELIALTQALKMAEGKKLNVYTDSRYAFATAHIHGEIYRRRGWLTSEGKEIKNKDEILALLKALFLPKRLSIIHCPGHQKGHSAEARGNRMADQAARKAAITETPDTSTLLIENSSPSGGSKRTADGSEFEPKKKRKV

SEQ ID NO: 3741 - protein, 2131 aa, synthetic construct
MKRTADGSEFESPKKKRKVDKKYSIGLDIGTNSVGWAVITDEYKVPSKKFKVLGNTDRHSIKKNLIGALLFDSGETAEATRLKRTARRRYTRRKNRICYLQEIFSNEMAKVDDSFFHRLEESFLVEEDKKHERHPIFGNIVDEVAYHEKYPTIYHLRKKLVDSTDKADLRLIYLALAHMIKFRGHFLIEGDLNPDNSDVDKLFIQLVQTYNQLFEENPINASGVDAKAILSARLSKSRKLENLIAQLPGEKKNGLFGNLIALSLGLTPNFKSNFDLAEDAKLQLSKDTYDDDLDNLLAQIGDQYADLFLAAKNLSDAILLSDILRVNTEITKAPLSASMIKRYDEHHQDLTLLKALVRQQLPEKYKEIFFDQSKNGYAGYIDGGASQEEFYKFIKPILEKMDGTEELLVKLKREDLLRKQRTFDNGSIPHQIHLGELHAILRRQEDFYPFLKDNREKIEKILTFRIPYYVGPLARGNSRFAWMTRKSEETITPWNFEEVVDKGASAQSFIERMTNFDKNLPNEKVLPKHSLLYEYFTVYNELTKVKYVTEGMRKPAFLSGEQKKAIVDLLFKTNRKVTVKQLKEDYFKKIECFDSVEISGVEDRFNASLGTYHDLLKIIKDKDFLDNEENEDILEDIVLTLTLFEDREMIEERLKTYAHLFDDKVMKQLKRRRYTGWGRLSRKLINGIRDKQSGKTILDFLKSDGFANRNFMQLIHDDSLTFKEDIQKAQVSGQGDSLHEHIANLAGSPAIKKGILQTVKVVDELVKVMGRHKPENIVIEMARENQTTQKGQKNSRERMKRIEEGIKELGSQILKEHPVENTQLQNEKLYLYYLQNGRDMYVDQELDINRLSDYDVDAIVPQSFLKDDSIDNKVLTRSDKNRGKSDNVPSEEVVKKMKNYWRQLLNAKLITQRKFDNLTKAERGGLSELDKAGFIKRQLVETRQITKHVAQILDSRMNTKYDENDKLIREVKVITLKSKLVSDFRKDFQFYKVREINNYHHAHDAYLNAVVGTALIKKYPKLESEFVYGDYKVYDVRKMIAKSEQEIGKATAKYFFYSNIMNFFKTEITLANGEIRKRPLIETNGETGEIVWDKGRDFATVRKVLSMPQVNIVKKTEVQTGGFSKESILPKRNSDKLIARKKDWDPKKYGGFDSPTVAYSVLVVAKVEKGKSKKLKSVKELLGITIMERSSFEKNPIDFLEAKGYKEVKKDLIIKLPKYSLFELENGRKRMLASAGELQKGNELALPSKYVNFLYLASHYEKLKGSPEDNEQKQLFVEQHKHYLDEIIEQISEFSKRVILADANLDKVLSAYNKHRDKPIREQAENIIHLFTLTNLGAPAAFKYFDTTIDRKRYTSTKEVLDATLIHQSITGLYETRIDLSQLGGDSGGSSGGSKRTADGSEFESPKKKRKVSGGSSGGSTLNIEDEYRLHETSKEPDVSLGSTWLSDFPQAWAETGGMGLAVRQAPLIIPLKATSTPVSIKQYPMSQEARLGIKPHIQRLLDQGILVPCQSPWNTPLLPVKKPGTNDYRPVQDLREVNKRVEDIHPTVPNPYNLLSGLPPSHQWYTVLDLKDAFFCLRLHPTSQPLFAFEWRDPEMGISGQLTWTRLPQGFKNSPTLFNEALHRDLADFRIQHPDLILLQYVDDLLLAATSELDCQQGTRALLQTLGNLGYRASAKKAQICQKQVKYLGYLLKEGQRWLTEARKETVMGQPTPKTPRQLREFLGKAGFCRLFIPGFAEMAAPLYPLTKPGTLFNWGPDQQKAYQEIKQALLTAPALGLPDLTKPFELFVDEKQGYAKGVLTQKLGPWRRPVAYLSKKLDPVAAGWPPCLRMVAAIAVLTKDAGKLTMGQPLVILAPHAVEALVKQPPDRWLSNARMTHYQALLLDTDRVQFGPVVALNPATLLPLPEEGLQHNCLDILAEAHGTRPDLTDQPLPDADHTWYTDGSSLLQEGQRKAGAAVTTETEVIWAKALPAGTSAQRAELIALTQALKMAEGKKLNVYTDSRYAFATAHIHGEIYRRRGWLTSEGKEIKNKDEILALLKALFLPKRLSIIHCPGHQKGHSAEARGNRMADQAARKAAITETPDTSTLLIENSSPSGGSKRTADGSEFESPKKKRKVGSGPAAKRVKLD

SEQ ID NO: 3742 - DNA, 33 bp, synthetic construct
  source 1..33: mol_type = other DNA
gccaacatgaggatcacccatgtctgcagggcc

SEQ ID NO: 3743 - protein, 131 aa, synthetic construct
GSASNFTQFVLVDNGGTGDVTVAPSNFANGVAEWISSNSRSQAYKVTCSVRQSSAQNRKYTIKVEVPKVATQTVGGEELPVAGWRSYLNMELTIPIFATNSDCELIVKAMQGLLKDGNPIPSAIAANSGIY

SEQ ID NO: 3744 - protein, 150 aa, synthetic construct
  SITE 1..150: note = This sequence may encompass 1-30 GGGGS repeating units
GGGGSGGGGSGGGGSGGGGSGGGGSGGGGSGGGGSGGGGSGGGGSGGGGSGGGGSGGGGSGGGGSGGGGSGGGGSGGGGSGGGGSGGGGSGGGGSGGGGSGGGGSGGGGSGGGGSGGGGSGGGGSGGGGSGGGGSGGGGSGGGGSGGGGS

SEQ ID NO: 3745 - protein, 30 aa, synthetic construct
  SITE 1..30: note = This sequence may encompass 1-30 residues
GGGGGGGGGGGGGGGGGGGGGGGGGGGGGG

SEQ ID NO: 3746 - protein, 150 aa, synthetic construct
  SITE 1..150: note = This sequence may encompass 1-30 EAAAK repeating units
EAAAKEAAAKEAAAKEAAAKEAAAKEAAAKEAAAKEAAAKEAAAKEAAAKEAAAKEAAAKEAAAKEAAAKEAAAKEAAAKEAAAKEAAAKEAAAKEAAAKEAAAKEAAAKEAAAKEAAAKEAAAKEAAAKEAAAKEAAAKEAAAKEAAAK

SEQ ID NO: 3747 - protein, 90 aa, synthetic construct
  SITE 1..90: note = This sequence may encompass 1-30 GGS repeating units
GGSGGSGGSGGSGGSGGSGGSGGSGGSGGSGGSGGSGGSGGSGGSGGSGGSGGSGGSGGSGGSGGSGGSGGSGGSGGSGGSGGSGGSGGS

SEQ ID NO: 3748 - protein, 120 aa, synthetic construct
  SITE 1..120: note = This sequence may encompass 1-30 SGGS repeating units
SGGSSGGSSGGSSGGSSGGSSGGSSGGSSGGSSGGSSGGSSGGSSGGSSGGSSGGSSGGSSGGSSGGSSGGSSGGSSGGSSGGSSGGSSGGSSGGSSGGSSGGSSGGSSGGSSGGSSGGS

SEQ ID NO: 3749 - protein, 60 aa, synthetic construct
  SITE 1..60: note = This sequence may encompass 1-30 XP repeating units wherein X is any amino acid
XPXPXPXPXPXPXPXPXPXPXPXPXPXPXPXPXPXPXPXPXPXPXPXPXPXPXPXPXPXP

SEQ ID NO: 3750 - protein, 16 aa, synthetic construct
SGSETPGTSESATPES

SEQ ID NO: 3751 - protein, 32 aa, synthetic construct
SGGSSGGSSGSETPGTSESATPESSGGSSGGS

SEQ ID NO: 3752 - protein, 10 aa, synthetic construct
SGGSGGSGGS

SEQ ID NO: 3753 - protein, 4 aa, synthetic construct
SGGS

SEQ ID NO: 3754 - protein, 60 aa, synthetic construct
SGGSSGGSSGSETPGTSESATPESAGSYPYDVPDYAGSAAPAAKKKKLDGSGSGGSSGGS

SEQ ID NO: 3755 - protein, 6 aa, synthetic construct
GGSGGS

SEQ ID NO: 3756 - protein, 9 aa, synthetic construct
GGSGGSGGS

SEQ ID NO: 3757 - protein, 33 aa, synthetic construct
SGGSSGGSSGSETPGTSESATPESSGGSSGGSS

SEQ ID NO: 3758 - protein, 34 aa, synthetic construct
SGGSSGGSKRTADGSEFESPKKKRKVSGGSSGGS

SEQ ID NO: 3759 - protein, 22 aa, synthetic construct
SGGSKRTADGSEFESPKKKRKV

SEQ ID NO: 3760 - protein, 12 aa, synthetic construct
GSGPAAKRVKLD

SEQ ID NO: 3761 - RNA, 30 nt, synthetic construct
  source 1..30: mol_type = other RNA
aacattgacgcgtctctacgtgggggcgcg

SEQ ID NO: 3762 - RNA, 55 nt, synthetic construct
  source 1..55: mol_type = other RNA
gggtcaggagccccccccctgaacccaggataaccctcaaagtcggggggcaacc

SEQ ID NO: 3763 - RNA, 60 nt, synthetic construct
  source 1..60: mol_type = other RNA
gtcagggtcaggagccccccccctgaacccaggataaccctcaaagtcggggggcaaccc

SEQ ID NO: 3764 - RNA, 56 nt, synthetic construct
  source 1..56: mol_type = other RNA
gggtcaggagccccccccctgaacccaggaaaaccctcaaagtcggggggcaaccc

SEQ ID NO: 3765 - RNA, 56 nt, synthetic construct
  source 1..56: mol_type = other RNA
gggtcaggagccccccccctgcacccaggaaaaccctcaaagtcggggggcaaccc

SEQ ID NO: 3766 - RNA, 56 nt, synthetic construct
  source 1..56: mol_type = other RNA
gggtcaggagccccccccctgcacccaggataaccctcaaagtcggggggcaaccc

SEQ ID NO: 3767 - RNA, 60 nt, synthetic construct
  source 1..60: mol_type = other RNA
gtcagggtcaggagccccccccctgaacccaggaaaaccctcaaagtcggggggcaaccc

SEQ ID NO: 3768 - RNA, 60 nt, synthetic construct
  source 1..60: mol_type = other RNA
gtcagggtcaggagccccccccctgcacccaggaaaaccctcaaagtcggggggcaaccc

SEQ ID NO: 3769 - RNA, 51 nt, synthetic construct
  source 1..51: mol_type = other RNA
gggtcaggagccccccccctgaacccaggataaccctcaaagtcggggggc

SEQ ID NO: 3770 - RNA, 13 nt, synthetic construct
  source 1..13: mol_type = other RNA
tggtggtggtggt

SEQ ID NO: 3771 - RNA, 20 nt, synthetic construct
  source 1..20: mol_type = other RNA
gggacagggcagggacaggg

SEQ ID NO: 3772 - RNA, 21 nt, synthetic construct
  source 1..21: mol_type = other RNA
gggtccgggtctgggtctggg

SEQ ID NO: 3773 - RNA, 19 nt, synthetic construct
  source 1..19: mol_type = other RNA
gggcagggtctgggctggg

SEQ ID NO: 3774 - RNA, 19 nt, synthetic construct
  source 1..19: mol_type = other RNA
gggctgggatgggaaaggg

SEQ ID NO: 3775 - RNA, 19 nt, synthetic construct
  source 1..19: mol_type = other RNA
gggctctgggtgggccggg

SEQ ID NO: 3776 - RNA, 18 nt, synthetic construct
  source 1..18: mol_type = other RNA
gggctgggctgggcaggg

SEQ ID NO: 3777 - RNA, 17 nt, synthetic construct
  source 1..17: mol_type = other RNA
gggtgggctgggaaggg

SEQ ID NO: 3778 - RNA, 17 nt, synthetic construct
  source 1..17: mol_type = other RNA
gggagggagggctaggg

SEQ ID NO: 3779 - RNA, 17 nt, synthetic construct
  source 1..17: mol_type = other RNA
gggcagggctgggaggg

SEQ ID NO: 3780 - RNA, 16 nt, synthetic construct
  source 1..16: mol_type = other RNA
gggtgggagggctggg

SEQ ID NO: 3781 - RNA, 43 nt, synthetic construct
  source 1..43: mol_type = other RNA
gcgtaacctccatccgagttgcaagagagggaaacgcagtctc

SEQ ID NO: 3782 - RNA, 160 nt, synthetic construct
  source 1..160: mol_type = other RNA
ggaattgcgggaaaggggtcaacagccgttcagtaccaagtctcaggggaaactttgagatggccttgcaaagggtatggtaataagctgacggacatggtcctaaccacgcagccaagtcctaagtcaacagatcttctgttgatatggatgcagttca

SEQ ID NO: 3783 - RNA, 42 nt, synthetic construct
  source 1..42: mol_type = other RNA
ttgacgcggttctatctagttacgcgttaaaccaactagaaa

SEQ ID NO: 3784 - RNA, 42 nt, synthetic construct
  source 1..42: mol_type = other RNA
ttgacgcggttctatctacttacgcgttaaaccaactagaaa

SEQ ID NO: 3785 - RNA, 44 nt, synthetic construct
  source 1..44: mol_type = other RNA
cgcgagtctaggggataacgcgttaaacttcctagaaggcggtt

SEQ ID NO: 3786 - RNA, 44 nt, synthetic construct
  source 1..44: mol_type = other RNA
cgcggatctagattgtaacgcgttaaaccatctagaaggcggtt

SEQ ID NO: 3787 - RNA, 44 nt, synthetic construct
  source 1..44: mol_type = other RNA
cgcgtcgctaccgcccggcgcgttaaacacactagaaggcggtt

SEQ ID NO: 3788 - RNA, 37 nt, synthetic construct
  source 1..37: mol_type = other RNA
cgcggttctatctagttacgcgttaaaccaactagaa

SEQ ID NO: 3789 - RNA, 68 nt, synthetic construct
  source 1..68: mol_type = other RNA
ggccggcatggtcccagcctcctcgctggcgccggctgggcaacatgcttcggcatggcgaatgggac

SEQ ID NO: 3790 - RNA, 18 nt, synthetic construct
  source 1..18: mol_type = other RNA
ggtgggagacgtcccacc

SEQ ID NO: 3791 - RNA, 24 nt, synthetic construct
  source 1..24: mol_type = other RNA
gagcagcatggcgtcgctgctcac

SEQ ID NO: 3792 - RNA, 21 nt, synthetic construct
  source 1..21: mol_type = other RNA
ccatcagttgacaccctgagg

SEQ ID NO: 3793 - RNA, 28 nt, synthetic construct
  source 1..28: mol_type = other RNA
gcagacctaagtggtgacatatggtctg

SEQ ID NO: 3794 - RNA, 24 nt, synthetic construct
  source 1..24: mol_type = other RNA
catgcgattagaaataatcgcatg

SEQ ID NO: 3795 - RNA, 118 nt, synthetic construct
  source 1..118: mol_type = other RNA
tctgccatcaaagctgcgaccgtgctcagtctggtgggagacgtcccaccggccggcatggtcccagcctcctcgctggcgccggctgggcaacatgcttcggcatggcgaatgggac

SEQ ID NO: 3796 - RNA, 76 nt, synthetic construct
  source 1..76: mol_type = other RNA
gttttagagctatacgtagcaagttaaaataaggctagtccgttatcaactttacgaagtggcaccgagtcggtgc

SEQ ID NO: 3797 - RNA, 76 nt, synthetic construct
  source 1..76: mol_type = other RNA
gttttagagctatacgtagcaagttaaaataaggctagtccgttatcaactttacgaagtgggaccgagtcggtcc

SEQ ID NO: 3798 - RNA, 88 nt, synthetic construct
  source 1..88: mol_type = other RNA
gttttagagctagctcatgaaaatgagctagcaagttaaaataaggctagtccgttatcaacttgaaaaagtgggaccgagtcggtcc

SEQ ID NO: 3799 - RNA, 76 nt, synthetic construct
  source 1..76: mol_type = other RNA
gtttaagagctagaaatagcaagtttaaataaggctagtccgttatcaacttgaaaaagtggcaccgagtcggtgc

SEQ ID NO: 3800 - RNA, 86 nt, synthetic construct
  source 1..86: mol_type = other RNA
gttttagagctatgctggaaacagcatagcaagttaaaataaggctagtccgttatcaacttgaaaaagtggcaccgagtcggtgc

SEQ ID NO: 3801 - RNA, 68 nt, synthetic construct; identical to SEQ ID NO: 3789
  source 1..68: mol_type = other RNA

SEQ ID NO: 3802 - RNA, 16 nt, synthetic construct
  source 1..16: mol_type = other RNA
tgggagacgtcccacc

SEQ ID NO: 3803 - RNA, 23 nt, synthetic construct
  source 1..23: mol_type = other RNA
  misc_feature 17..23: note = This region may encompass 3-7 nucleotides
tgggagacgtcccaccttttttt

SEQ ID NO: 3804 - RNA, 28 nt, synthetic construct
  source 1..28: mol_type = other RNA
  misc_feature 22..28: note = This region may encompass 3-7 nucleotides
ccatcagttgacaccctgaggttttttt

SEQ ID NO: 3805 - RNA, 31 nt, synthetic construct
  source 1..31: mol_type = other RNA
  misc_feature 25..31: note = This region may encompass 3-7 nucleotides
catgcgattagaaataatcgcatgttttttt

SEQ ID NO: 3806 - protein, 16 aa, Drosophila melanogaster
RQIKIWFQNRRMKWKK

SEQ ID NO: 3807-3808 - skipped (2 entries)

SEQ ID NO: 3809 - DNA, 32767 bp, Homo sapiens
  source 1..32767: mol_type = other DNA
ctgctttctctcaactctaaaatacttagatctgtgtctttcacacagcgtataggctttgtgctttatgctttgtagtgattgggttgagaacatgcttctgctaaatacagcatgttgatatttgaaaacatggcagaagctggaaagtcactctcaccttccctcctctcctttctcctgatgcgggtcataaaaccttggaatgattttctgaacttcccctgaagcaggtcctaagaccctcatgtaagaagtgctgcctatatccacagtacctatctccacaggaaaggtactttcttacctctgaagactgacgggttacagagaaaaatctgaacaaataagccttgctaaattccccccaagtttattcccatctttgttcaactgtatctccccacaactgtccactcttcatgaaacctggcatagaaacacacaagtttaacagcttctctgggtcttcctttccttaggaaggctcctatgtcatgggaaacttacatgcaatgtctatgctttgctcctgttaatcttttattatggaggcctcagccatgaacctaggatgggtacagaaaagccatttttcattccctatagtaatctcgcaataggtatctattgattaatttatcaaataggctcagccaaagtgcgaatgcccagtgacacaatgaagagctgccacctccaggttcttagtcagggcttgctttgcagtgagggagagaaactcactgaagtcagcataggtaaagggatgactgttgcaaggatatggggcaatcctgtggacaactaagaacagaaaaaatatatagtcagttaaccttaaaattaggcttaaaaataaaaaataaggaatggaagctcccctctctctcacagaataaataacagcctttcaacgtcattttgcttttctctgccagccaactttctttgctacttacatatttttcttccccaagtaactccagttggcatgagggctttagctcctgttgtatagagatgttacagtctctcagtgttgcaattccaaattccccagcaatagtttgattggttcagctagggtcaggctaccatctctggttcaattagctgtggctagtaatggaggctctagtacaaacatgtcctcctaggtgcattctttcagcagagcctagggagtgagcatatcgggggcagggtagaagtggcagcttccatgcagcatttataatacatttccctttttccatgaatttccatctcctgcagccatccctttcttggccttttccccttcacggtggcagatcaaagcccttcactattatctgctccgtttcttaaagtgtttctggcacaaaaaatattctcattgttctcttctctagttcaacttacatttcctcagttggaatgttttaatgggaaagtaatgtggtgattagagtgcagaagcctctgggatcacctcaccctattttcaagtcaccagcctgggccaggagcaagaacattataagtaagaggccactgtaaatggagttgaagccaggttccaccctccactagaagagatggctctgtgcatgagtttctgtatctgtgaaagtggaatattaccactgtggattacataagatcactgtgagaatcaaagggaataacccaggccaaggagttagcccagtgcctggaacttcaacacgcattattcacaactgaggtacaagaggcaaatatcaaagccatggacaagatagtgttaagggcgtgatggcatgtgcctgtaatcccagctactcatgaggctgaagcatgagaattgcttgaaccggtgaggcaaaggttgcagtgagctgagctgagatcatgctactgcactccagcctgggcgactgagtgagactctgtctcaaaaaaaaaaaaaaaaaaaagaaaagataatgttaaatgttggggtgccaaataaggactggaaaccaggtgggtggtgtctgaactaattctggaagtaggagtcttggtacaatggtttccacaacgtggattctaagacagttgattctatttgttgaactttgaaggaaggtttgataatgtcaggaactttgcagcactcagccaattgacttgttttcctctagaatgtaaagatttaatgtaaacgatgtaataattttcacctaaataggccatttttcattttgcgacattatttgtgattgggttctatactacaaccaaaactgtgttccagagtaacacacacctgggcccggtggcccacgcctgtaattccagcattttggtgccactgaggtggttggattgcttaagcgcagaggtcgaggctgcagtgagctgtgtttgcaccactgcacttcagcctgggtgagagtgagatgcagtctcaaaacaaacaaatcaaaaccacacacacacacacacacactcccacacacaaacaaaaattggatcacccataatcaattttatgattcaattaaaaagagggtttgtattgaaatatctgtttctctggaaactttctgggcattttacaaagtgaacatctcactattgcttaaaatattattaagatagttccatgtatatgaatgccaggcaaaatgaatccctataaatataagtttggatctttatgctatatatgcttcctatttaggtctaatttaggcctaaacatggtgtcatttcatatactgcaaagttggatgagcctagcaattctttattaaccactgaactaaaaagacagaaaactgggatatggcaagacatcaatcattaacaaacactaaaaatgatttttcagcgaatatgtaaaaggatgtgggtaccaaaatagataatttctctcaagaaatacatactttaattgctttctttgctgataaatgcagaacttaaacgtcaactcactctcgatttgttaccacagaggtgactttctcatggtcaaggtgccacgatgagtgcccctcaggcatgtatttccctacccaggacttgcttttgatttatccatgtcacactatgcacacatcaaaaacacatcgacctctctgctgtaaaacagaacgaaatcatgtcctttgcagcaacatggatggagctggaggacattatcctaagtgaacaaactcagaaacagaaaatcaaatattgcatgttctcataagcgggagctaaacaataggtatacatgtacataagaatgggaataacaagacactggggactccaaaaagggagagggtgggaagggggtgagggctgaaaaattagctattgggtacaatgttcaatgtttgggggacaggtacaccagaagcccaatccccaccattacacaatatacctatgtaacaagcaagcacatgtacccccgaatctaaaattaaaaaacaatcaaaaagcaccgacttccttaactggcatggaatagtttcgagaatggatgtaaacaccgaattccttaatgtagttgcagattctgccagttttgtctcaacctctggatcggttcctttttttaactacctttaattcttaaacagattgttgctattgctatgctatatacttattgtatcacttataaatgtataacctctgcaaattagtctctgaattgaaagtattcattggtaaaacgggtatttcttcaccataggaatagttggacatgtttaaatacttgagagctatttttattacaagcacacacagctttgtggtgttttttgttgagacagagtctcgctctgttgcccaggctggagtgcagtagtgcgatcttggcttactgcaaccttcgcctcctgggttcaagcaattctcctgcctcagcctcctaagtagccgggagtacacactaatttttgtatttttagtagagacgggtttttgccatgttggccaggctggtctcaaactcttgacctcaggtgatccacccgcctcagcttcccaaagtgctgggattagaggtgtgagccaccgcgcccggcctgtagtgtgtttttgaacgtatatgtgaagttgtagcttttttttttttttttttgagacggagtctccctctgtcgccaggctggagtgcagtggcgcgatctcggctcactgcaacctctgactccctggttcaagctattctgcctcagcctccagagtagctgagattacaggcgcccgccaccgcgcccggttaaacgttttgtatttttagtagagacggcgtttcaccatgttggccagaatggtctcgatcttctgacctcgtgatccgcccgccttggccttccaaagtgctgggattacaggcctgagacacagcgcccgacctaagctgtagttttatgattatgatttatggttgtgaggcattgatttaagacattttaaagcttaagtcgtcagatcctagaagaaaaaaaaattcaccaagacaagctaatgccattgtcataaatgggagtttggagaaaattttattaatatttgtttgggtggtttatgtacagcgttgaactgatttgaaccccgaccaaacactgtatggaactaatgtacggtaggggaaatcattaactgaagatgccttttttgttgctattgtttagaacgcagttagaaaatcttattttagaggttttaccccgttgacaaagcctcaacttttcttcaaaagaactaatttccattttacctcccctacattttgaacagaatatggaagaagccagcgccccttctccgcgggcgctgctgcaaccctgctcccgccggggcttccgcgcgaaaccgggaacactggagcagtaccgactccgctcgcctagaacccgccccagccgggcccacttccgccagagccctggccgcgcccgccccgccccacggacccgagattcgtcggaattttcccgcgacgccgcgggagcgcgcggggccgctagccaggccccagaatgcactgctgacacgtgtgcgcgcgcgcggctccactgccgggcgaccgcgggaaaattccaaaaaaactcaaaaagccaatacgaggcaaagccaaattttcaagccacagatcccgggcggtggcttcctttccgccactgcccaaactgctgaagcagctcccgcgaggaccacccggtaagcggcaggccgcagaacgcagcgagggcggaggcttccctcgggggtctggccgacacgtcagcggcgagagcgggaggaggaggcgaggggcaagagggaaggctcgcgagagcgggtgggccaggcgcgccttgcggtgggcgagaggggttcccgccggcgcagggctgtggctaaggctgaggcgggaggcgggaggcgggaggcggaaggtggcgggcggtgccagcccgcggggcggggccagggcggggaaagcgggggcgggagccggcgctggggtcgcgcggaagggagcccccggagaggcgggagccgggtgttggcgttttggttctttttgttcattgagcgcaggcagctatgtcttcttcaaaggagaggagcaaaggtgaatttctctgcctcggactcgtgggagccgtgaaaagctcgcccctttgagccggtcgccctctacagctggcctcgtcctccccgtccctcacacccctgcccccaaaccccattcgccggggcgccaggaggggcgaggtccaattagaggagcccggggcgcggctgttacccctcccgccctccgccttttattcccggagggaggcgggttcgcagaggccagtgtcttccctccattctttttgtggacgccaggccatatcttcaaagcccgtgagagatttttcaggtgctgtttgttggtttgctctttttaattttttaggtgggtgcgtttacaactacgaaccctctatgatcttatgtgtccagcgcaccgaatgggggaaaagacttggagttttataacatgggaaattgggtaccagaatcttaagggaagagaccaaggagttttctagcaaagtcctgtatgtgcctggacttttgttctaatctgaaacttggaaaactcccgggcatctgattttattctaacttgtgccccatttaatgcatctaaactgtgatgtgatttgacttagcatttatcaaatgagcagagcacttttgggccacccaacttcagctctttgtggctgtcactcactgtcagtgatatgccctcagacagatcgttttctccttactcccctgaaaggttgttacaaacagtagaattcataccatgtgttgagatcattcattacctaagcttagatggaaaacatgttcattgcgactttatacattaaacttgaattgatgtttcaatgttatgtgctgtaccagagtcacctggaaataagcactcatatacattattcatatacaagaaaggctgcatcgaaaaagaatttgttttcctagatatatcagagatctttttcaccaacccactactcccagtaatagagcctgcttcttgagaactggactaattatactttgtatattatacattcgaatttatttttgctttattcggtcatattttctcttgatttctccaaaaacgtttaccaaggcatcagaaaagaaaagcaggctctatattggtattttttgttttgtcctctaataaaaagcattaacttgattgattggctggttgtggaagatgtgttgctgcatgtatgtgcaactgtgcatgtacattttaaaacaaatggtacttttaaccagttccatatttcagcaggtagttccaataacaattatacaaatttcgtgtttatgagaaccagctacagggaggccagcctggccagtagaaagttggattgattatctgggccatggagagagccagaggaaactcacatgagtggtagttccaagttggtagtgttagggcctcaaatcgggctggaaatgagcaccaaatgatttttaaaagttttattttaggctgggatatgtgcattctctgtcttgtttgtggatcttgagtgattgacttaatgtgaaaaaatacatacaggagaagcaccttggaagttttgcaatgttttaataaaaatgcagaagtggagaaggaaaggcaattcagataacaggcagagcatggtggcttatgcctgtaatcccagcactttgggaagcggaggcggaaggatcacttgatcccaggagttcgagtccagcgtgggcaacagagagagccctgtctctacaaaaagttaagaaattagccggccatagtgatgcggggctgtggtcccagttactcgggaggctgaggtggaggatcacctgagttcaggaggtcgaggccacagtgaactgtgattgcgccactgcactccacactgggcagcagactgagaccgtgtctggaaaaataaaattggtaacaattcagattggccaccagagttggactgggggctagcaggcaatggttttacctccattttgagattggcatcttctaactcaagtttaatacgggactgagggtaagagacctgcatgccttttatgtcagcattacattatcttgattatggcagctttatagtaagttttgaaattaagtagtgtaagttatccaatgtttttcttcattttcaaaattgttttggcggttcagggttccttacatttccatataaattttagtatcagtttgttattttttttcagaaaaccgtgctgtgatagactttgtaggaattgcatttaattttgcatatctatttgggggagaattgccatctcatcatgaacatggaatctctttccatttgttgagcgctttaatttctcttagcagtatttagtaattttcagtgtacaaattttgcccttttgtaaattaattttgaagttttatttttgatggtattgtgaattgaattatttttaaaatttcattaaaattttttttatcgataaagtgaaagcaagttttttgttttttttttgagacagagtctcgctctgtttgcccagactggagtgcagtggcacgatctcggctcactgcaatctccgcctcccgggttcaagcgattcttctgcctcagcctcccgagtagctgggactacaggcacccttcaccacgcccggctaatttttgtatttttagtagagacggggtttcaccatattggtcaggctggtctcaaactcctgacctcgtgacccgcctgcctcggcctcccaaagtgctgggattacaggcgtgagtcactgcgcccggccgaaagcaagtttattaagaaagcaaaggaataaagaatggctactccacaggtagagcagccgaattatttttaaaatttcattatggattgttgtcagtatataaacatacacttgatttcacttattaatcttatatcttgcaaccttccttgttgaacttgatgattacttccagttttttgtgaattacacaggattttctacatacggcatcatgccaatatagttttacttttctttccatgtggatgcctttagtttcttttttgcctgattaatttttttcttacctggttcgaccctccagcactttgctgaatagacatggagtgtatattattgacttatttctcatcttagggggaaaacatttaatcttttaccattagatacgacgttagctgtaagtttttcataaatgcactttatcaggttgagagattttccttctgttactagattgttgagaattcttatgaacaaatgttagaaatgttgcttttctgcatctattgagatgactgtggttttgttcctttatcaatatgatttattaactgatttgtgtatttatactaaccttgcattctaaatcccatttagtcatgttatataatcctttttacatattgctggatttggcttagtaatattttgtttaggatttttgtattatgttcatggtaatattagtaatattttgtcttgtgatgtctgtctggctttggtattaccgtaatagtggcatcttagaatgagttgggaagtgttccctcctattttttcagagtttgtgaaggattggtatttttttttcttcaaatatttgatagaattcactcacaaagtcatcagttcgtggatatttctttatagggaaatttgaaattacaaattcaggttctccagcgcacgcatgcgtgtgacttctccggtgaaggttgtcgtgcgcgcacctggccgtgactcctccagagcgaggttgtgcacacatgcgcgcgccttctccatcgccagcttccacatactttctccagcactggttcccaggcacacacgtgacgcttctccagggcggagctcccatagtgtgtgcggctttctagcgctcactcttggtgggtgtgctttgccagcgctagctccctggggtgtgccgcttccccaacgctggctcccgtgcttgggtgccgccccagcacctgttcccaggcgtgtgcacgtctccagcgctaggtccttggcatatgtgcttctgcagcgccggcttctgtggtgtgtatcttccccagtgcaggctcttgtagtgcgctgtgatcagctgcacccaatggtcaactgtgtacctcagcatccccctcaggcgattttgtaactgagcctgtggtgggacacctccctgtgaacacttttcctggcgccctagaggatgggtttctggcaagttaccaaaggtggttttccagcaagttgtactggtacagcacccacagagacatctctcgtattcagtgagccatggctgtgctccctccaaaaagttcttgatcccatttctgggaagaagtgggtatttttccttagggcacccacctcagccctaggggcagtggctcctccttatatctcctattcctgtgttttgtagaattctctgtacttcttactagccagcaccttgttactccagtcctgttacagtgaatagttcttgactgggcatggtgacttatgcctgtaatcccagcactttgcgaggccgcagggcttgggagaattacttgagactaggagtttgagacaagcctgggcaacatagcaaaacccctgttctacagaaaacacgaaattatctgggagtggtgtgtgtcccacctactacggaggctgatgtgggaggatcgttgagcccaggaggttgaggctgcttggagccatgattataccattgcattccagcctgggcaacagagtgagaccctctctctaaaaaagaaaatgacaacaacaacagtaattatttatagttgactttccttattcaaattattatgtggtttctttttactgactggacccagactgatttatcacctttgctctgaacttcctcaagaaatcatgagtggtgagagtatttagtctgttcattttcttgaattgtgaaagttaatcctaaggtttctcccacttccacatgacgaaagacacgtttgtgtgagagtatgtaggcttttatgaagtgatgaaactgcctttccatgcctttgcaaattagaaacagtatagattatcatggaaagtggggtcagagattaggaggggaggagaagaggacaggattagaactgtggtcgaccttatggcatccagtgggcagggttcccagatgacctgactttagatgtgactgtacttctcattatctttcacccctgtttttcatttttcagatttctgggacttgtgttttcattttcctctagagccccaatgatgcttttgtaattcagaaacatttatgtgtgatataaacattttatatacatttagctattttagtggaatctgagatctgttactctggtgactacccataagacagtttgaggctgcggtttttcacacacacacacacacacacacacacacacacacagattcagaggagactatttaaacaatatgaatttggctgggtgcagtgctgtgcacctgtagtcccaactatttgagaggctgaggctggaagattgtgagttcaagtctcctgggcaaaattgtgagaccctatctccagggaaaaaaataaataaataaaaggctatgactttatgtctgtgattccttctttacctggttcagttcaaaggtatggaattgccagacacttttgcttcttttataagattttggaggtgccatttaccttagtgacttccaacaccctcctatggctggttcctttttgttgtcattttgtttttgttggttgttactgtttacttaaagctataacattataaggcattgtacttagcctaatcctatttttgtaattatgcttgtacattcaagtgctgtactcaatagatttccttattaactcctgattttttttttttttttttttttgagacggaatctcactctgtctcccgggctggagtgcagtggcgcgatctcggctcattgcaagctctgcctcccgggttcacaccattctcctcctgagtagctgggactacaggagcccaccaccacgcccagctaattttttgtatttttgttagaggcggagtttcaccgtgttagccaggatggtcttgatctcctgacctcgtgatccgcctgccttggcctcccaaagtgctgggattacaggcgtgagccaccgctcctggccaacgcctgatttattgatgaccatttgtggttatgcataatgacttttcctctgtctttgtgcactgcagttcatattattgccttatgtgtatatgcttgtttccacaactcttagccaacttcttcagggtatattcttttttattatataactgcattgatgtttgttgagtgccaacatcctttcctcccttctctgtcataacagaccctagattttcttttagtagtcactattctatgggctctggggaacactgatactacctctagctcctgggggtggacttttattggtttaaggagtgtgttttattgattcgtcacagtcattggttaaggatgggcataagctcaagcaagtccagtctgaatacatctgaggtctgtctcttacttgggatgctggaacagaagtatgtactctatttttgggtggtatggatgtgatgtgacttctgtaatggctaaagctgttttgctatcatgagggaagcaggatggagagacagatcaactgtgaagtctgccctgtttctggacttgccagtttcttgaaccaacgaattccccccctccttttttttttttctcttttgaaacagggtcttgccctgtcaaccaggagtgcagtggcacgaacatagctcactgcagcctcaaactcctgggctccaggaatcatgccacctcagccacctgagtaactaggactacaggtatgcaccacaatgtctggctaattaattatcattatttttgtagagacagagtcatgctatgttacctaggctggtcttgaactcccagcctcaagctgtcctcctgcctgggtctcccaaagtgctgtgatgagaggtgtgagccaccatgcctggcctcccattattgttttagctggttttgcttggtgcagcaggggcatttaatgcttactaaatatttagatcttccctcacatttcccagttcacttgcagctaggtaggacattgtgattgttctagccaatagattttaagcaggttatttccaggtagaagcatttagtagcagattcctgacctagctatctcttctttttgcaatggtgattctggaggctaggtgttgagatgtctgagcacctgtcatgctggatccatgagtgactgtggagcagaacaacacccccaccccacaaacatgtgtgtcccacataacatgttggacatatagtatcagaaaaaagttactacatcataacttagcctatcttgatgaatagagttgggttttcaattactggaaaccaaaggcatcctaggtgatatagtataattttgtaattcttagtgtgtatttggtgatttacaatgtatgcagattatacattgtaattgattagtaagacacttgtctgaaggaatcagttatatttagccctagctttctgaatttggtgtacccaaacatgaccttgtccaacatggattgtaacgattacttagcctatctacccctacatattaaagattataataaaacactatataaaatatacatttatacaaataatatcgaattgctgcttttgcttgaagccgttagctaggaatttccaatcataggccgtaagagtgagtaaccgtttattattggtataacagcatgcattttatttatgaagtagtattttctgcagtatttggcacccagaagagtatcttgtgtttctgatactgactagtaccattagaatttttagtcattacactaaaaaagttggcaaagctagtgaaacttttgcttgatgataagtattttgataagtggtgactttttgaaactatgcagccagttttaggagtaacagaaatatttttatatgaaatggtataatatgactgattttttcttaaaattgagtagttgtaagcaagaaaagtgcaatacaaatatctttttcttttttcgagatgcatctcactcggtcccccaggctggagtgcagtagtgcaatcataactcgttgcagtcttgccctcctggactcaagtgatcctcccacctgagcctcctgagtagctgggactacaggcatgaggcagacactgtgcctgcccttaaaaatatcttgaattttggtagtgacattcctttgaaggtattaaaagctagaaatttgtttcattctatcaaagtttcaggtatcttcatttagttctacacgtgtgtgctgtacccatctaatgtttgcctaaaattgtactgtctttttggttttaaaataatttaagtctaggccgggcgtggtggctcatgcctgtaatcgcagcactttgggaggccgaggcgggtggatcacttgagtcctggtggtcaaggatgcaggtcggctgggcaaggtagctcctgcctgtaatcccagcactttgggaggccaaggcgggtggatcacttgaggtcaggagttcgactccagcctggccaacagggtgaaacctgtctctaataaaaatacaaaaaaaactagccgggtgtggtgacatgtgcctgtaatcccagctacttgggaggtggaagtacaagaatcgcttgaactcgggaggttgcagtgagctgagattgggccattgcacaaacaaacaaacaaaaagcggtgatctgtgattgcaccactgcactccagcctgggtgacagagcaagaccctatctcaaaaaaaaaagaaaaaaaaattaagcctaagatgtttaatttaaaaataagtttttaaaaaagtatgtttttgaggcaaaatggtgagaataggacaagtatttgaaaatattgtggtacttgatcagaaccacctttggttacattgttttgtggccaaagtggctatgactaaatgactacatgttattttaaaaacattgtttctaaggtattactgatgtacatgaatggattgatattatcatggagtggtttgttataaaagcgagtttggccctcttgtgctctgtcgctgtgtgatgccttccattgcgatgtgacccctcaatcttagacttcccagcctccagaactgggagctgataaatttctgttatttgtaaactactgagtctcacatattctggtatagcagcacaaaacagactaagacaggcagttgggcaacagcaagtctgagttcccttccagcagcaactggcaggagtgaaatcctggctgtcttctttgcagtcaaatgctctaccactgagctatacctactggctatcttctttggacagttgctgtttttcaccacaagcctgtctaattgctttactcatttaacttatctgttgtggactttgaatttatgacctttgtctaaagtaatttaagttttgaataattctgaaatgcattcagttgttaaactaacacttagaaaaaaatggacagatcagaacaaatttgtcatacttattggagaaattactgcattaatcagggttctctggtgacttctaagtttcatatctgtagaaaaggttattattattcttgagcagtaagatactgtataccctttataaatcagagctttttgttctgttgattttatacaaatacgttggttttataagcatggtttttttttgttaactacttcttttgatttcttaatttatttctaacattactttgggcaatagccctattaaaagtgctttgtactttccaaattatttccatatagattatatgggattctcacaataaccatatgtgctaaggtaagataggcattttaaaaaaagaaaaacagggctgagcacctgtaatcccagcactttgggaggcagaggtgggcagatcacttgagcccgtaagttcaggacgagcctgggcaacatggcgaaaccttgtctctacaaaaaatacaaaaattatccaggcgtggtgacatgcaactgtagacccatacagtgtgacatgcaactgtaggctgaagtgggaggatcgcttgagcctgggaggttgagggtgcagtgagctatgatcataccactgcactccagcctgggtgacagagcgaaaccctgtgtctaaaaactaaataaataaataaaaattagaaaagaaaaatagaatggagacttttcaaaaaaattactttggctcataattaaggaattcccaagagattgcccaaaggaggatagctactgatgaacttcttgggttgattgtgtgtgtacagcttttaaatgtgtcttaattgttatgagatgataaccttttcaataatcaaaagagccgggtatttctggttacccaaacccaactgattttagcagaaaacatttgccttaaataataacttctctttgaaatgtttagagagaaggaaactgagtttaatggcagggttgttggctgttacccagggaaactaactcctgtctggtgctctttttgttgcaccagtagttcgatgtccaaggggggctgaagcttcctatggaagcattgttaagcaagtctttcgcaggctttcggttgcatctttctactgtgtaaataggggcattaggagaaatgtaatctttgaatactgcccaaccagtttctgcttggtaatgtgccctgaaaccctcaatgaatgccagcaaacaaattagatccacagtgtatttgatacgcatgtcttttccccaaacaaaattcaaatttcacaaacacaaactgagtcattttccaaatgtttgtatatgaatggaagtttttgtcctgttcttctgtaaccaataccataaaacttctgaaggtccttgatgcatttattgtacaatgttaatccaaaacaaaactttattctgactaaacttgtaggtatagagagataccaaactcatttttgttgatcagtacaacatgtttgtaccaaccagatctaaaaaatgtgtaaaggagtgccatgctgtaaagaccttattacagttgtaaacatcagtgcagctgttacaaatctagcaaaacctcaggttaaacaatttcaaatttactgaagatgacattccagacccagttttcataacataaacactctaggaaatgcctttgagatgagtgggattgtcattaatattaatgccaccaaattcaaggctgagaagtcatttcttttcaagctttattttcactcctaattttggaataaaatatacttttaacctgaagtatggcgtgtcttttcacagcctgaaaacatttgatcctgttgcctttgaattgtaggaatgcaaaaatacagtataagtcttttattcttgatggtcatttaacttaaatgagtttgttagaattaaagttgggaagaattaactgttaatggaactcagttgcattgttcaattaaaaaataaaaggatgctaaaaatagttgctgtttaaggattgtattagtgtgacattttagaatgctgcatttagggaaggaattttattctaaagtgatttgaagcacatttttttgtggtcctgtctttcatctagacaaggtaggacaagcattcaaaacctgtaccagtcttaatctgtttttttcttcttagtttccacttagtgggacatctggtgaggtatcattttggccatatagtcatttctaaagtttctttctgtgctctgatttccaattaagtcttctatgatgtttgccaaatttaagagcatgcaggggtccactggaagtgctgaataactgggctttggcctaattctttgtgcatggctgtatgtgtggggtgattttgttttctttgcttgtttattggtaattgcattaaattccatttgcctttactgaatttttttttgttggacttttggggaaacctctaaattggataatagagcaattaagtgactgtttgtaagcgatcctcagtgctctattagagaggcagcatttatcaaaagaaaacagttgaatttctcttgtttaaacttgcttttgaaattctgttaattttctaataaggagaattgaagccaagcattgtcaagtaccatattgtaatctgaagttggtaactgtggaagcacatagttgatatggtgatacctttttcagaggaactttggctatttccatcagcataaaggacacaacagactgcatctattgccttcacctctgccttatttcttctgttttcccttttttttttttttttttttttttttgagatagagtcttgctctgttgcccaggctgcagtacagtggcacgatcttggctcactgcaacctccgcctcccaggttcaagggattcttgtgtctcagcctccaaagtagctgggattacaggcgctcgccaccacgcccacctattttttttttttcgtttttagtagagacagggtttccccatgttgcccaagctggtcttgaactcctgggctcaaatgatctcctccctcagcctcccaaagtgctgggatcacaggtgtgagccaacactcctggcccccttttttttaaaaaaaattaaagaggttgtggaggtttctttgaattcttttggtgtttttaaaaatgttatattttgagaagaaaatctgggcaggtacaaagaacccctccctttcctgtttgaaaacttttttgcagtcgccctggaattttccttcactgtcattcatccttctctcctttcttgatattgggtcttctgtttactttattttctttctttgttttctccctcctcttgatgtgaagcagatgttctagtatcttcctaaagcagaatgtgtgggagatgaattatttctagtcactgcctgttgaatgtgaagttattctagtcacatttgattgatagtttgtctagataagaattccaggttggaaattattttcctttagaattgtgaggcattgtttaatttccttctaccttcctgtgtttttacaatttcatgatgatgtgcctggtgtggatctcttctcatccattttcttgggcacttggtcagccctttcaatctggaaactcctgtcttttcgttctgagaatatttttggtgattatctcttcccttccatattggaactcattacaagaaagctaattaaggaagagtagagggttgtgttatgggctgaattgtgtccacccctcccccattcataagttgaagctgaagctgtaacccccaatgggactgtatttggagatggagcctttaggaagtcataccggtggggtcctaatctggtaggattggtggccttagaagaagaggtagagagagagatctctccccacatgagcacaaagaagaggtcatgtgaggacacaggtggctgcctacatacaagccaggaagagggctctcaacaggacctaataggccttgattgtggactttacagcctccagaattgtgagaaaatacatttctgttatttaagccaccatgtatgtgatattttgttatggcagcctaaactgacgaagacaggttgaggtcaagctaggacctcagcttcataaaggtgaactgcatgcgttgcaagagaatattaacatgatgctggtgcgcgtgtgttctcctttttgactggtccctttttgaacttagctcactcatctgcatatcaccctttgtgagttagcacaagtcattaacccaaggttctagatctgtgctgaccaatgccatagtcaataggtacgtttaattatataaatttacattaattaaaattaaataaaattcaaaattcacttcctcagattcattagccatattgcatgcgttcagaagccacatgcagctggcgcctgcagtattggatggacagatagagccagaacctttccatccttgcagaaagtctggctgtacaaccgtattctagatacttgccttacacctctccctctctcttttttttcttgtccagtgggtctgaacttttttaggttcaagacatacttaggaatactagaatttgtagtggacatcttcaaggttttaaaacaacactaagaagtaaacagccattatagtgcaaactctgccaaagtgtcatatgcatactgagtctataactgcgtctgcagtgatcatgctattcatttggccatgcttctgcagtatggcccttagaagagctgttttttacccctactgggctttctgatatgtttgtaggacagagaattgcaggaagcaggccttcatatctgagccgtgctgctctggtttgctgtgctgaatgttgctgtgctctcccggaagaggtaggcacaagtgctttagaaggaactgtcagaaccccactgctctactgagcactggtgagtctgaggattcacaggctaaaggcaggtcactgaaagcggcctacattctggaatttctcggaacagattatttcctgagatgacaaaaagtataattttggtcagaaggatcactgaatttcctggaatctaccccaccaggctgtgtcttcataggtgggaactgttctcaagaatcctcaaaacagccctttgaggtaggttctgtttcactcccaaagagaagcgaggttggcactcagaaatttcacatcatttgccctggctcactgaatgaactagtgaatagtgacgccgggttcagacctttccgtttttctttaaaacttgtgtttctttctaccagaatgcaactagggttggccagtgaccccttctgtccaccacgtgggagcagctctcctaaagctgggctctgcattaaagggattgtttacaaattcattaaattaaacatgtttaattcagggtaaaaactgaatgatttagaagatcttttttcttttgtttttttctttgttttttttttttttttgagatggagtctcactctgtctcccaggctggagtgcagtggcgccatctctgctcactgcaaactccgcctcccgggttcctgccattctcctgcctcagcctcccgagtagctgggagtacaggcgcccgccaccgcgcctggctaatttttttttttttttttttagtggagatggggtttcaccgtgttagccaggatggtctggatctcctgacctcgtgattcacctgcctcggcctcccaaaatgctgggattacaggcgtgagccaccgcgccaggccttttttcttttattttaaagaactgttgttatttttatttcaattaaattgaaaaacacagggaaaaaatgcaacaacaacaaatcccaggcagggcatggcaactcacgcctgtaatcccagcactttggatcacttgagtccaggagtttgagaccagcctgggcaacatagtgagacctcagctctagaaaaaaagaattagctgggcatggtggtgcatgcctgtggtcccagctactagggaggctgaggtgggaggatcgcttggaggaggttgaggctgcagtgagcctaaatcagtcatgccactgcactccagcctgggcgacagaacaagaccttgtctaaaaaaaacccagaaccaaaaaaaacaaaaaaccccaacaaatccctcatagcaccagcacttatttttgaagacttcctgtacttacacatataaatattttgtacaaaaatgttatgatattataaatatttttctgcagcttccttatttgacttaagaatttatgatgaacatctttctgagtcagtcaggaatattcttcatgcactgttaactcctctgttactttaacaattttgtgtgtgtgtgtgtgtgtgtgtgtgtgtgttttgatggttattgttatactgactttagccacttttcatcattttagcctttaggtctctttttttctttgtgtggtcttaaccgagaaataattgcaagcgaggaacaaagtcttaaatttggtggcactcaccaccaaataattgcagatgtttgccttccttctacatagaaagagcccactctcatgctgtatttgttcttctcatcctcccctgtcttatttctctttcatttcgtttaattttaacctcaataccagacttattttgtgcagcccttggcctgctgcggagttatctttgccactggctctctttccagcccccagtcgctgatgtgtctcttggcagctagtgtaaatgatggtggtcctctcattctgacgtgggagcaccccaagtcagcagtaatatttggtgtaacaagtaccagggtgggataaccacatatccctggactgggattttaaaattgtcagttgtcctgtcatttgtggtttagggatcaacttgagcaagagaaactccgtctctactaaaaatacaaaaaaaaattagccaggcgtggtggcagttgcctgtaatcccagctactcaggaggctgaggcaagagaattgcttgaacccaggagtcggaggctgcattgagccgagatcgtgccactgcactccagcctgggcgacagagcgagactgtctgaaaaaaaaaaaaaagaaattgtatttatttcctacagacttctttttcttggttatcacctgacattgccttatcaggtattttattatgtattttattcctttttattatttttggcttaaattttccttttagtcttttacttggatcattctttcttattttctcctccatattttggattcttcagacttcttcccttttcttaatcttaccattaccagatttcccttctgcttaaatttcatgatccagtttttcagtggatggagatagaaggctgaggtgaggaaggtgggggtaaatacgatacttgctgaatttcaaatataaaacaagatattaaggaacttatttccttttttattccctatatttgggagaccatagaattggctggccgctaatatcaagtggcttttgtgtgtagacccttacaaagaaatgactgataaagtccctacttctgggagttctgatagtaaaaagtgtgacatccatgacacatacattgccagtcaatgatggatagaaatggacagactttgaggagatgagttttgagtatacagagataccattttgtgtgtgtgtgtgtgcgcatgcatttgagacagggtctcactctgtctccctgcctggagtgcagtgatgcggacatggctcactatggcctcgacctcccaggcttaaacaattctcccacctcagcctcccgtgtagctggaaccacaggcatgcgccaccatgtctggctaattttttgatgttttgtagagctgaggtctcactatattgcccaggctggtctcgaactcctggactcaagcgatcctccttcctcagcctcccaaagtgctggaattacaggtgtgagccactgcagggccgcagagatacagtatatttgtgataccattagtaacttttatttgacagagggttaagtattgactaagggataaaacctattctggggcttagaaaacaaggttttgctccaagaaggcggttagatgtggataacggtttcagtactgaatttggaacctttttactaaaatgtagtctacatgtgggtatctagcaatagagtcactgttagtaaagaactatatatgtgacatacagaggaaccacatacagtttcttaaaataatatgttcttcatctttgaggaaatcctagacaaagctggaaaaatttcaagttttcttattgctcattacaaattatagggattttgatattgtgcagttaaaagttcagtagattttcaaaactagttattaattgacctcggttctgcacatttttgttgctttgcaagagtacccttaaggctcaaataaagttaaaagtaaggtaaatggtgtgttagactaaaactgtattttttgtctgtcaacacttaaatagaaaaacaaactagcttaagaacatgactgcaatttaggatcttaaaaccatatataccgtagtatttttaaagcctgcaaccaaaaagtagaatcattgtgttttatagcactttgaaattctgtctgatgttactgtatgtctgtgctgtcctgatatggcttttggattgcgtttgtggtacaagattgatttcttgtatttgtatattacttggctgcacagatggtatccgcttcaaatctactaaataaaactagaacaatgattttgccagttggttttgactgcttttatttattttggatggctgtagtctttgtgaagatggcagactaaacctggaagtgacagctaagaacagaatgggtgggctacaggtctgctaattgatctcagcagaactcatgctacttctccctgggtacaagacgttttcttcaattgaatgttcacaggccagctgagccatcctttgctcccatatctctattgtccttggcccagaccttttctcatcctccctgggttatctcatccatttccatagctttagttactgtctctctgttgatgtttctacatctatgtcttcagctcaggcctgtttcctaacctcttcctcacatacccactgcctattggacctcttcatttagatgccccaggtctcttgtactcaccatgccctaagctgagcctatctttttatccaagtatgttcctactcctttgttgcccctttcagtgtatggtggcataacacatctagttctctaatcagaaacctaagcaacatctttacctcctctctattccttttttttactatgtctgatctaaatactaaatactatgtgttctccctgataagcatctcttatctgggtgcttttctctattccttcatgtgactagactaggcctcagttactgtaagatggtcttccatcttacagtatgatcttgtctcccctggtggtccattttctatattgcttgtgtgatttttctgaaacagaaatctgagtatatcactttaatgctaaaaatcctccagtgacttacctttgctcttagaataaagtccagagtccttactctgttttgtaaagtccttttaaatccatctactacttgcttgagcagggtgacagtcttggtaaaatgtacttttatagccagaagtccccctcacacttaacatatcatgatgctttcctttcttgtgagaagcgagaaattttattgtgacattttgtccattagtaaaccacactcagatctgtgtgcccctcttccaaaaaatacattatacatatttctacaaagagagaaaacatgtaatagttgtcaggttcttttgagaaatccttttgtagaagttatgcttggtgttgttttaatgtttttattacaaagtagagagcctgtctgatgaatcttacacaaataaagtaatggaggtaattagataacaccacagcctttcctttctctccagaagaggtaacaagagtcagcattcatttggaagcagttgcccagacatgccaacagaagttgtgggcatctgtatctccttctaagaaagcgggtttcctgaaaaccttgggaaaggaaggaagagagggacggagagagggagggaagatgctatgtaggtgggccagtcaccagcagagggataaaaaatggtgagatcaaaatataaaagcacgagtagtgtattcctttggctggcctctatctctagatgccctaaaatgtttatctccattattataagtcagtgtagatgcctagagaaaggaggcatccctgatttgggcaggattctaaacaattgccttttgtattgttagtctacactttgctgaaagtccctcttgcctcagtctgctgttcccctggtgagcccccacatatggttcagttctcagtgtcaggtctctttttctggaaactttcctcaacaccccaaatctgggttaagtgctccacttagtctgctgtactatgtaacacttctcactctgcagttttagtttgtattttaagttcagtgactatgactaatgttattgtttgaaatgaaagagattttaagagtttcttcaagaggattgaccagagtcctgagacatttctccattcctaaatatataaaagccatgagttgcctttgaacttcattacaattttgaaaatttttagacatatcaaaggtattctgtagatgagagctagcccgcttcaatccagttgtgactatcttgagtgtgaatgtcagtgttcatgtttgatgttctttattttggtgtatactctaggtgtaaagccagcccaatattgtcccaacacatgactgtgtttgtttggctaactgaatacaccttacctgccttttctccactttctgtcttcatatcgaaatccatacacttgaaatattctaatccattagatatatgtaatttcctcatttatgctttactgaaaccctgttggaaaattcaaattaattacccttagattaaaaaaaaaagcctaacaaagctctgtggatttggtatgggaacatatcaataaattttttaaaataaaaaccacataattatttttaaagacaacatttattttcagatctgttgagtttttccacctatttcttcaaagttttccttgtcatccaaagacatgacatttgaggatctgtctctttactacttttctatttttcaggcaatgaaacctcttgttacatttaattagtgtgtctaggtcatgatccttagtcattttaaattggagtgtgatagagaggttttaatatattgtgcagtagatccttgatattttcagatgtaaaaggtttgttttgatttttaaaatcactttattgagatatgattgatatataaaaagttgtacatatttaatctatagaactcaatgagtttgtggataagtatatacccatgaagttatcaccaccatcaaaactgtaaacatacccatcacctcccaaagttccccctgcctgttttgttattatttttttgtgtatggtaagaacacttaatataagctctactcttttagtacatttttactatacagcataatattgttagccatgggcactatgcaatatagtagatctccaaaatttacttctcttttaggactgaaactttgtacctttaactatcacctctcaatttcccctcctgccagcccctggcaacagccattgtactctttttttttttttttttaattgatacagggtctcactgtgttgcccaggctggaatgagtggcgtgatcatagctcactgtagcctcaacctccggggctcaagagatcctcctgctgtagcctcctaagtagccaggactacaggcatgcgccatcctgcctggctaattttttattttgtacagatggggttttgctctgttgcctaggctggtctcaaactctggcctcagatgatcctctcttattgtggttttgatgtgtatttccctgatgattactgatgttgagcattgtttcaaataactgctagccatttgtttgtcttctttgaagaaaagttggttcaggtccctttgaccatttaaaagatcaggtttttttgttttgctttgttttgttttgctttgttttgttttgttttgttttttgttttgttttggtattgagctgtttgagttccttatataatatattctggatattaacaccttctcagatgcatagtttgcaaatattttctcccattctgtaggttgtctcttcacgctgttattttctttgctgtgaagacatttttagtttgatggatttttagtttgatgtaattccatttgtctgtttttgcttttattgcttttgtggtcttatccaaaaaatctttgcccagaagaccagtattatgaagcattttctctatgttttcttctagtagtttcataatttcaggtattacatttagcccattttgtgttgatttttctttttttttagatcaacatctcaaactttataatacactcacatttatacacaaatttctgtttacaagtacaaaaggcaaagaactgcaaagaagctaagcaactgcatcatcagccacattcaatcgaattaatactgttgtcccccgtccgtagttttaatccagaggaaatggtagatgccgtctcacacatggactccactgttagttttagaagttggagactgtgtgtggttccgcagaagtctgggtttctacagagctgaactgagactccatcatgttccaggccatatcagccagaagaaagtcgtccattgttgtttgagtttcgttgttggtgaagaacaagctccccagggtttcaaacccagaactcatggtctgtgtttctatactgttcaactgaactttgctttctagagcaggtatatctttaacagtggagattccttcagtttgtgtctctgtgtcagatgaatcagtactcatggaaaagctggagtgtttcagaatacttcccagaggcagatgagggctactgtctaagaaaaagtttaagtctgtctgtgtttgtctgtcaaacatctcaaggcctaagaagttagaatttcccctacacccataggactgagcagaggtatctgcgagtaagaagtccgtttgagtctctgtgtccagtgactccaagactggctcagtgttcatggtgctaagttcactctcttcagtttgagtctggatatgtgaggccgaaaagaactcttcaatatcaaaattgattccagggttctgggctgggccagatgggagctgggtgtcaggtccaggatttgtgttagacaaaagactatgatgatccaatgtctgagcaggcagattacttgacaagatgttttccaaatcacttaataaatctatggtttgggtctgattatctgtcatgttctgtgaaggaagcatactgttctgtgcactgaagtttataattggtgcacatttctcaatctcttgatttaaagtcttaggctcattctgaggtaacaaactatgagttactatctctgctactaaactgttgcttataatgttacttgtagcaacattatatgatgaatgaacactcaaaaatgtctctgcacattccagcttggtccatctgtacatggtcatccgttggactttgtatcccactggtttgagtttctcaggagaccccacccgactggaaacaggtgtccataaatgcatcagtctgagcagctatagatgaagttaccttagagctgggcaaaaatgtctgagtgtgaacactaatgggaagagacacttgagaatcaaacaacaaatcagtttgagaacaagacgacacagaggaatcagcggtggcccactgtgcagaaggtataaagttttgtgaggcataagacagatctgtctgcacgttgattgaagaaatgccgttcttctgacatgtgttccctagttcttgtaaagtattagatggacttttacccaagttcacttgaacaccagtacttattggctcaacagcaacaggatcagcaatttagaaaagaagtaggctctctttaagagagcaagcctctgaatctaggccgaggatcagggttcctactgacaagggcaggcagtaagtgcacagcccctgtggcagagccctgatcaacacctaacaccacaggctgggctgaggagtcggctgtaggcacaaagacaggcatgagagaaaactgcatcacgggtagtttaagcaaagccactttgggctttggtaaaagcaacttttgaggctatctcggtgatgttgtaagaaagagtctgcttgtcagtgttagagccacaagagtcttcaaaagatggttctagctttatttctgaagcttctagttcttgggtgtctggtctagggattggttggttgttaaatgattcagtggtcttgttggataacttctggttttgcacagttttccattttccttttcttactaggtgggtccctgtgttctgcagggatctcgtggccagttcggtagatgtgagactgcaatgcttttctactggcgtagggacagccgcatgtgcaccggaaggtcttgccacagtcctctgcaagtcttttcaggtcccattctgtaccgtacgaattgctgcacttgctacatttgtgcttcttctcagcatggattttcataaagtgctgttttacgagagaaaactgagaaaatggtctgtcagggcctctggggcagccttcgattggacaacagtagaatttcggtacagttttcaaatcttttcttattattggattgactgtgctatactgcatgcggtggctcttgaccaggtgcatgttgagcgcggggctgttgggcaggatcttgcggcagccgcgcacggtgcacaggatgttgggccatgtggtctgggacagctcgctcacctactgctggatcagctcccccgccagcacggaggccgcgggctgctgcgtcacccccgcgggccgcggccggctgcccctcagtcggggtcccgggggcacccacgggcccgaggcggcggcggaggctcctctcgtggccgccgggacggcgcgggcacccgccgccagagccgtggaccccgccgccgccaccgcctccgaggccgccatggctcccgcagggcggccaggcccagctcgcagttgtgttgatttttctaagtggtgagagatagggtctacctccgtttttctgcatgtggatatccagttttcctgaacaccattcattgaagagactgtcctttccccagtgtgtgttcttggcgcctttgtcaaaaatcagttgactgtaagtgtgttctcttttctgttccatttgtctgtgtgtttttatgtcagtactctactgttttgcttactatagctttgtagtatattttgaagtcaggtaagattgatgcctctagctttgtttttttgacgcaagattgctttggctctttggggtcttaatatatatatatatatatatatatatttttttttttttttttttttgagacagagtctcactctctcacctaggctggagtggagtggcgcgatcttggctcactgcatcctccacctcctgggttcaagagatcctcctgcctcagcctcccgagtaaccgggactacaggtgcctgccactatcctcagctaatttttgtatttttagtagagatggggtttcgccatgttggccagggtggtctcgcactcctgacctcaggtgatccacctgcctcggcctcccaaagtgctgggattacaggcatgagtcactgtgcccagcctccatacaaattttaacggacttttaaaagatacgaattcttccaatctgtgaacatggggtatcttcccattttttgtgtgtcttcaatttttttcaatattttatagttttcattgtagagatctttcacatccttggttaaatttatacctaagtattttatttctttttttttggcaggtattgtaaatgggattgctttcttgatttatttttcagatagtttgctattaatatttggtgtatagaaacactaatgatttttgtttgttgattttatatcctgcaacttgactgaattcatttattagttctaatagtttttttttagtggaatttgtagggttttctatgtactgtgtcatctgtaaacatagacagtttaacttcctcctttccagtttggatgccctttctttctttctcttacctaattgctctgggtaggatttccagtgctgtgttggatagaagtggtaagagtggacctcgttgtattgttcctgattttagagaaaatgcttttaacttttccccagtcggtatggttagttgtgggtctgtcacagatggccttgtgttgatgtacattccttctatacctaatttgttgacagttttttttatcatgaaagatgtcgaattttgtcaaatgctctttctgcatctattgagatgatcatatgatttttattcttggttctgttaatgtggtatatcatcttcatagattggcgtatgttgaatcatccttacaacccaggggtaaatttcatttgatcatgatatgtgatctttttttatgtgttgttgaattctgtttgctagtgttgtgttgagtgaggacttctgcatctaagtttatcagggatattggcttatgattttctttttgtgtctttgcctcctattcttagcagtgttcccttgaaagcaatttgtctttttataatctctgtctgcttttaggacttcctctttgcctttagtttctgcagttttactgtgtattttacttcagaggagtgtgttttgtcccattttccagaggtcttgttggactgagctctggttacctacccactctggtagttggcttaataaccctcctttcattggctgtgattccctgtgtcacttctctactttcttaatggtgttccctttattgtccaaataaactactctactcaaatccctttttcaagatctccttcttgggagtaatagggcttcttcgatctgaggattaatgttcgtgttgatcacaatggaatagtgatattgctgacagaaagatatcattggttatacttggaagatcctcagtttccctaatggcaaaagacttgggaatctgtggatcaagatggagcatatatgatcccagacagaagtattgtttctcaggtcccccagagttccccaaaggatggatttgcatggcaagagaagctcccttatcacttctaatggggttttatatggttttggtcaattacccttccactgcttgaacattactcttctggaacccagtgacatgtgtgcctactcaggaggtagaattaactgattcacaacaattgccaaacgttttttagagtttactgcaaggttggatgacatgaagaccaattttctggaatcagtctttcagaagatgtaagcctcaggcatgtctgatttctattctaaaacgtgtggctgggcacaatgga

SEQ ID NO: 3810 - DNA, 1677 bp, synthetic construct
  source 1..1677: mol_type = other DNA
atggctcaagattcagtagatctttcttgtgattatcagttttggatgcagaagctttctgtatgggatcaggcttccactttggaaacccagcaagacacctgtcttcacgtggctcagttccaggagttcctaaggaagatgtatgaagccttgaaagagatggattctaatacagtcattgaaagattccccacaattggtcaactgttggcaaaagcttgttggaatccttttattttagcatatgatgaaagccaaaaaattctaatatggtgcttatgttgtctaattaacaaagaaccacagaattctggacaatcaaaacttaactcctggatacagggtgtattatctcatatactttcagcactcagatttgataaagaagttgctcttttcactcaaggtcttgggtatgcacctatagattactatcctggtttgcttaaaaatatggttttatcattagcgtctgaactcagagagaatcatcttaatggatttaacactcaaaggcgaatggctcccgagcgagtggcgtccctgtcacgagtttgtgtcccacttattaccctgacagatgttgaccccctggtggaggctctcctcatctgtcatggacgtgaacctcaggaaatcctccagccagagttctttgaggctgtaaacgaggccattttgctgaagaagatttctctccccatgtcagctgtagtctgcctctggcttcggcaccttcccagccttgaaaaagcaatgctgcatctttttgaaaagctaatctccagtgagagaaattgtctgagaaggatcgaatgctttataaaagattcatcgctgcctcaagcagcctgccaccctgccatattccgggttgttgatgagatgttcaggtgtgcactcctggaaaccgatggggccctggaaatcatagccactattcaggtgtttacgcagtgctttgtagaagctctggagaaagcaagcaagcagctgcggtttgcactcaagacctactttccttacacttctccatctcttgccatggtgctgctgcaagaccctcaagatatccctcggggacactggctccagacactgaagcatatttctgaactgctcagagaagcagttgaagaccagactcatgggtcctgcggaggtccctttgagagctggttcctgttcattcacttcggaggatgggctgagatggtggcagagcaattactgatgtcggcagccgaaccccccacggccctgctgtggctcttggccttctactacggcccccgtgatgggaggcagcagagagcacagactatggtccaggtgaaggccgtgctgggccacctcctggcaatgtccagaagcagcagcctctcagcccaggacctgcagacggtagcaggacagggcacagacacagacctcagagctcctgcacaacagctgatcaggcaccttctcctcaacttcctgctctgggctcctggaggccacacgatcgcctgggatgtcatcaccctgatggctcacactgctgagataactcacgagatcattggctttcttgaccagaccttgtacagatggaatcgtcttggcattgaaagccctagatcagaaaaactggcccgagagctccttaaagagctgcgaactcaagtctag

SEQ ID NO: 3811 - skipped

SEQ ID NO: 3812 - RNA, 135 nt, synthetic construct
  source 1..135: mol_type = other RNA
gcacctatagattactatccgttttagagctagaaatagcaagttaaaataaggctagtccgttatcaacttgaaaaagtggcaccgagtcggtgcggctatacacacatttttaagcaaaccaggatagtaatc

SEQ ID NO: 3813 - RNA, 137 nt, synthetic construct
  source 1..137: mol_type = other RNA
gcacctatagattactatccgttttagagctagaaatagcaagttaaaataaggctagtccgttatcaacttgaaaaagtggcaccgagtcggtgcggctaaatacacacatttttaagcaaaccaggatagtaatc

SEQ ID NO: 3814 - RNA, 139 nt, synthetic construct
  source 1..139: mol_type = other RNA
gcacctatagattactatccgttttagagctagaaatagcaagttaaaataaggctagtccgttatcaacttgaaaaagtggcaccgagtcggtgcggctttaaatacacacatttttaagcaaaccaggatagtaatc

SEQ ID NO: 3815 - RNA, 141 nt, synthetic construct
  source 1..141: mol_type = other RNA
gcacctatagattactatccgttttagagctagaaatagcaagttaaaataaggctagtccgttatcaacttgaaaaagtggcaccgagtcggtgcggctttttaaatacacacatttttaagcaaaccaggatagtaatc

SEQ ID NO: 3816 - RNA, 139 nt, synthetic construct
  source 1..139: mol_type = other RNA
gcacctatagattactatccgttttagagctagaaatagcaagttaaaataaggctagtccgttatcaacttgaaaaagtggcaccgagtcggtgcggctatacacacatttttaagcaaaccaggatagtaatctata

SEQ ID NO: 3817 - RNA, 141 nt, synthetic construct
  source 1..141: mol_type = other RNA
gcacctatagattactatccgttttagagctagaaatagcaagttaaaataaggctagtccgttatcaacttgaaaaagtggcaccgagtcggtgcggctaaatacacacatttttaagcaaaccaggatagtaatctata

SEQ ID NO: 3818 - RNA, 143 nt, synthetic construct
  source 1..143: mol_type = other RNA
gcacctatagattactatccgttttagagctagaaatagcaagttaaaataaggctagtccgttatcaacttgaaaaagtggcaccgagtcggtgcggctttaaatacacacatttttaagcaaaccaggatagtaatctata

SEQ ID NO: 3819 - RNA, 145 nt, synthetic construct
  source 1..145: mol_type = other RNA
gcacctatagattactatccgttttagagctagaaatagcaagttaaaataaggctagtccgttatcaacttgaaaaagtggcaccgagtcggtgcggctttttaaatacacacatttttaagcaaaccaggatagtaatctata

SEQ ID NO: 3820 - RNA, 141 nt, synthetic construct
  source 1..141: mol_type = other RNA
gcacctatagattactatccgttttagagctagaaatagcaagttaaaataaggctagtccgttatcaacttgaaaaagtggcaccgagtcggtgcggctatacacacatttttaagcaaaccaggatagtaatctatagg

SEQ ID NO: 3821 - RNA, 143 nt, synthetic construct
  source 1..143: mol_type = other RNA
gcacctatagattactatccgttttagagctagaaatagcaagttaaaataaggctagtccgttatcaacttgaaaaagtggcaccgagtcggtgcggctaaatacacacatttttaagcaaaccaggatagtaatctatagg

SEQ ID NO: 3822 - RNA, 145 nt, synthetic construct
  source 1..145: mol_type = other RNA
gcacctatagattactatccgttttagagctagaaatagcaagttaaaataaggctagtccgttatcaacttgaaaaagtggcaccgagtcggtgcggctttaaatacacacatttttaagcaaaccaggatagtaatctatagg

SEQ ID NO: 3823 - protein, 9 aa, synthetic construct
RRRRRRRRR

SEQ ID NO: 3824 - protein, 8 aa, synthetic construct
RRRRRRRR

1. A prime editing guide RNA (PEgRNA) or a nucleic acid encoding the PEgRNA, wherein the PEgRNA comprises:
a. a spacer that is complementary to a search target sequence on a first strand of a FANCC gene wherein the spacer comprises at its 3′ end SEQ ID NO: 136;
b. a gRNA core capable of binding to a Cas9 protein; and
c. an extension arm comprising:
i. an editing template that comprises a region of complementarity to an editing target sequence on a second strand of the FANCC gene, and
ii. a primer binding site (PBS) that comprises at its 5′ end a sequence that is a reverse complement of nucleotides 10-14 of SEQ ID NO: 136,
wherein the first strand and second strand are complementary to each other,
wherein the editing target sequence on the second strand comprises or is complementary to a portion of the FANCC gene comprising a c.67del mutation, and
wherein the editing template encodes an insertion of a guanine nucleotide at a site corresponding to the c.67del mutation compared to the editing target sequence.

2. A prime editing guide RNA (PEgRNA), or a nucleic acid encoding the PEgRNA, wherein the PEgRNA comprises:
a. a spacer comprising at its 3′ end SEQ ID NO: 136;
b. a gRNA core capable of binding to a Cas9 protein; and
c. an extension arm comprising:
i. an editing template comprising at its 3′ end SEQ ID NO: 157 or 158, and
ii. a primer binding site (PBS) comprising at its 5′ end a sequence that is a reverse complement of nucleotides 10-14 of SEQ ID NO: 136.

3. The PEgRNA of claim 1, wherein the spacer comprises at its 3′ end any one of SEQ ID NOs: 137-141.

4. The PEgRNA of claim 3, wherein the spacer comprises at its 3′ end SEQ ID NO: 139.

5. The PEgRNA of claim 1, wherein the editing template comprises SEQ ID NO: 157 at its 3′ end.

6. The PEgRNA of claim 5, wherein the editing template comprises at its 3′ end SEQ ID NO: 159, 160, 162, 163, 165, 166, 168-181, 183, 184, 186, 187, or 189-194.

7. The PEgRNA of claim 1, wherein the editing template comprises SEQ ID NO: 158 at its 3′ end and encodes an AGG-to-AAG PAM silencing edit.

8. The PEgRNA of claim 7, wherein the editing template comprises at its 3′ end SEQ ID NO: 161, 164, 167, 182, 185, or 188.

9. The PEgRNA of claim 1, wherein the editing template is 10 to 40 nucleotides in length.

10. The PEgRNA of claim 9, wherein the editing template is 10 to 32 nucleotides in length.

11. The PEgRNA of claim 10, wherein the editing template is 12 to 16 nucleotides in length.

12. The PEgRNA of claim 1, wherein the PBS comprises at its 5′ end a sequence corresponding to sequence number 142.

13. The PEgRNA of claim 1, wherein the PBS comprises any one of sequence numbers 142-146, or any one of SEQ ID NOs: 147-156.

14. The PEgRNA of claim 1, wherein the PBS is 8 to 14 nucleotides in length.

15. The PEgRNA of claim 14, wherein the PBS is 14 nucleotides in length.

16. The PEgRNA of claim 1, wherein the gRNA core comprises SEQ ID NO: 3666.

17. The PEgRNA of claim 1, comprising a PEgRNA sequence selected from any one of SEQ ID NOs: 219-322 or 3592-3603.

18. A prime editing system comprising: (a) the PEgRNA or the nucleic acid of claim 1, and (b) a ngRNA, or a nucleic acid encoding the ngRNA, wherein the ngRNA comprises:
(i) a spacer comprising at its 3′ end a sequence corresponding to nucleotides 4-20 of any one of SEQ ID NOs: 4 or 195-218; and
(ii) an ngRNA core capable of binding a Cas9 protein.

19. The prime editing system of claim 18, wherein the spacer of the ngRNA comprises at its 3′ end any one of SEQ ID NOs: 4 or 195-218.

20. The prime editing system of claim 18, wherein the ngRNA core comprises the same sequence as the gRNA core.

21.-119. (canceled)
